(19) United States
(12) Patent Application Publication
(10) Pub. No.: US 2022/0389418 A1
(43) Pub. Date: Dec. 8, 2022

(54) RNA-GUIDED CAS NUCLEASES AND USES THEREOF IN DIAGNOSTICS AND THERAPY

(71) Applicants: HELMHOLTZ-INSTITUT FÜR RNA-BASIERTE NFEKTIONSFORSCHUNG (HZI), BRAUNSCHWEIG (DE); UTAH STATE UNIVERSITY, LOGAN, UT (US)

(72) Inventors: CHASE BEISEL, WUERZBURG (DE); RYAN JACKSON, LOGAN, UT (US); OLEG DMYTRENKO, WUERZBURG (DE)

(21) Appl. No.: 17/335,818

(22) Filed: Jun. 1, 2021

(51) Int. Cl. C12N 15/11; C12N 9/22

(52) U.S. Cl. CPC C12N 15/111; C12N 9/22

(57) ABSTRACT

The present invention relates to methods for RNA-directed cleaving of a nucleic acid molecule selected from dsDNA, ssDNA, and RNA based on a complex comprising a CasΩnuclease and at least one pre-selected guide RNA designed for binding to at least one target RNA. Further provided is the complex of the present invention bound to a target RNA molecule, as well as respective systems for cleaving of a nucleic acid molecule, and diagnostic and therapeutic uses thereof.

[0001] The Sequence Listing for this application is labeled “SeqList-01Jun21-ST25.txt”, which was created on Jun. 1, 2021 and is 670 KB. The entire content is incorporated herein by reference in its entirety.

### FIELD OF THE INVENTION

[0002] The present invention relates to methods for RNA-directed cleaving of a nucleic acid molecule selected from dsDNA, ssDNA, and RNA based on a complex comprising a CasΩ nuclease and at least one pre-selected guide RNA designed for binding to at least one target RNA. Further provided is the complex of the present invention bound to a target RNA molecule, as well as respective systems for cleaving of a nucleic acid molecule, and diagnostic and therapeutic uses thereof.

### BACKGROUND OF THE INVENTION

[0003] Almost all archaea and about half of bacteria possess clustered regularly interspaced short palindromic repeat (CRISPR)—CRISPR-associated genes (Cas) adaptive immune systems, which protect prokaryotes against viruses and other foreign invaders with nucleic-acid genomes. The CRISPR-Cas system is functionally divided into classes 1 and 2 according to the composition of the effector complexes. Class 2 consists of a single-effector nuclease, and routine practice of genome editing has been achieved by the exploitation of Class 2 CRISPR-Cas systems, which include the type II, V, and VI CRISPR-Cas systems. Types II and V are principally used for targeting DNA, while type VI is employed only for targeting RNA (see, for example, Koonin E V and Makarova K S Origins and evolution of CRISPR-Cas systems Philos Trans R Soc Lond B Biol Sci. 2019 May 13; 374(1772):20180087).

[0004] Types II and V Cas effector nucleases commonly rely on protospacer-adjacent motifs (PAMs) as the first step in target DNA recognition, and the effector nucleases directly bind the PAM sequence through protein-DNA interactions and subsequently unzip the downstream DNA sequence. The effector proteins then interrogate the extent of base pairing between one strand of the DNA target and the guide portion of the CRISPR RNA (crRNA). Sufficient complementarity between the two drives target cleavage. PAM sequences are known to vary considerably not only between systems but also between otherwise similar nucleases, and it was shown that Cas proteins can be engineered to alter PAM recognition (Collias, D., Beisel, C. L. CRISPR technologies and the search for the PAM-free nuclease. Nat Commun 12, 555 (2021). https://doi.org/10.1038/s41467-020-20633-y). In addition to targeting DNA, some Type II and V single-effector nucleases such as the C. jejuni Cas9, the N. meningitidis Cas9, the S. aureus Cas9, Cas12f1 from an uncultured archaeon, and Cas12g have also been shown to target ssDNA and/or RNA (RNA-dependent RNA targeting by CRISPR-Cas9. Elife. 2018;7:e32724; DNase H Activity of Neisseria meningitidis Cas9. Mol Cell. 2015; 60(2):242-255; Programmed DNA destruction by miniature CRISPR-Cas14 enzymes; Functionally diverse type V CRISPR-Cas systems. Science. 2019; 363:88-91). In these cases, no PAM was required. Some nucleases such as the S. pyogenes Cas9 (SpyCas9) were not able to immediately target ssDNA or RNA, although providing an oligonucleotide to generate a double-stranded PAM region allowed SpyCas9 to bind the single-stranded target and cleave it (Programmable RNA recognition and cleavage by CRISPR/Cas9. Nature. 2014; 516(7530):263-266).

[0005] Cas13 proteins, such as Cas13a of Leptotrichia shahii (formerly C2c2), bind and cleave RNA instead of DNA and bind to a Protospacer Flanking Site (PFS) instead of a PAM. In vivo studies have shown that target RNAs with extended complementarity with repeat sequences flanking the target element (tag:anti-tag pairing) can dramatically reduce RNA cleavage by the type VI-A Cas13a system, defining the molecular principles underlying Cas13a's capacity to target and discriminate between self and non-self RNA targets (Wang B, Zhang T, Yin J, Yu Y, Xu W, Ding J, Patel D J, Yang H. Structural basis for self-cleavage prevention by tag:anti-tag pairing complementarity in type VI Cas13 CRISPR systems. Mol Cell. 2021 Mar. 4; 81(5):1100-1115.e5. doi: 10.1016/j.molce1.2020.12.033. Epub 2021 Jan. 19. PMID: 33472057).

[0006] In the context of the present invention, removing the flanking sequence from the target RNA abolishes cleavage activity, and the flanking sequence is thus activating for CasΩ, and also seems to require a specific sequence (versus lack of complementarity with the guide RNA tag). The role of this flanking sequence is most closely related to an rPAM (for RNA PAM), which have been reported for type III CRISPR-Cas systems that encode multi-subunit effectors (see Elmore J R, et al. Bipartite recognition of target RNAs activates DNA cleavage by the Type III-B CRISPR-Cas system. Genes Dev. 2016 Feb. 15; 30(4):447-59. doi: 10.1101/gad.272153.115. Epub 2016 Feb. 4. PMID: 26848045; PMCID: PMC4762429). Therefore, in the context of the present invention, the term rPAM designates the sequences flanking the RNA target that are required to activate CasΩ.

[0007] Cas12 nucleases (within Type V CRISPR-Cas systems) are known to recognize and cleave DNA, thereby eliciting degradation of ssDNA. Since the development of the CRISPR-Cas9 system, various CRISPR systems have been identified in bacteria and archaea, including CRISPR from Prevotella and Francisella 1 (Cpf1, also known as Cas12a), and Cas14 (recently classified as Cas120; these systems constitute a diverse genome editing toolbox in which each tool has unique utility. The CRISPR genome-editing tool consists of a gene-targeting guide RNA and a Cas endonuclease. These two components form a ribonucleoprotein (RNP) complex that recognizes target sequences accompanying a protospacer-adjacent motif (PAM), subsequently inducing a double-stranded break (DSB) either inside or outside the protospacer region.

[0008] U.S. Pat. No. 9,790,490B2 describes Cas12a (Cpf1) enzymes, including Cas12a (type V), which corresponds to CasΩ according to the present invention.

[0009] Recently, it was found that Cas12a also degrades non-specific single-stranded DNA (ssDNA) upon crRNA-mediated, specific, binding of either ssDNA or dsDNA. More recently, FRET and cryo-EM experiments demonstrated that Cas12a undergoes a series of checkpoints during target binding that culminates in exposure of the RuvC domain, which initially cleaves the unwound dsDNA target by first cutting the non-target strand, then the target strand, and subsequently remains activated, allowing for indiscriminate ssDNA cleavage (Swarts D C, Jinek M. Mechanistic Insights into the cis- and trans-Acting DNase Activities of Cas12a. Mol Cell. 2019 Feb. 7; 73(3):589-600.e4. doi: 10.1016/j.molcel.2018.11.021. Epub 2019 Jan. 10. PMID: 30639240; PMCID: PMC6858279). US20200399697A1 describes the diagnostic use of Cas12a based on its collateral degradation of ssDNA.

[0010] Smith C W, et al. (in: Probing CRISPR-Cas12a Nuclease Activity Using Double-Stranded DNA-Templated Fluorescent Substrates. Biochemistry. 2020 Apr. 21; 59(15):1474-1481. doi: 10.1021/acs.biochem.0c00140. Epub 2020 Apr. 7. PMID: 32233423; PMCID: PMC7384386) report a dsDNA substrate (probe-full) for probing Cas12a trans-cleavage activity upon target detection. A diverse set of Cas12a substrates with alternating dsDNA character were designed and studied using fluorescence spectroscopy. They observed that probe-full without any nick displayed trans-cleavage performance that was better than that of the form that contains a nick. Different experimental conditions of salt concentration, target concentration, and mismatch tolerance were examined to evaluate the probe performance. The activity of Cas12a was programmed for a dsDNA frame copied from a tobacco curly shoot virus (TCSV) or hepatitis B virus (HepBV) genome by using crRNA against TCSV or HepBV, respectively. While on-target activity offered detection of as little as 10 pM dsDNA target, off-target activity was not observed even at 1 nM control DNAs. They demonstrated that trans-cleavage of Cas12a is not limited to ssDNA substrates, and Cas12a-based diagnostics can be extended to dsDNA substrates.

[0011] U.S. Pat. Nos. 10,337,051B2, 10,494,664B2, 10,266,887B2, and US20180340219A1 disclose Cas13a (C2c2) as an RNA-targeting nuclease with collateral RNase activity, systems and methods for diagnostic use.

[0012] Baisong, T., et al. (in: The Versatile Type V CRISPR Effectors and Their Application Prospects, Frontiers in Cell and Developmental Biology, Vol. 8, 2021, p. 1835, DOI: 10.3389/fcell.2020.622103) disclose that the class II clustered regularly interspaced short palindromic repeats (CRISPR)—Cas systems, characterized by a single effector protein, can be further subdivided into types II, V, and VI. The application of the type II CRISPR effector protein Cas9 as a sequence-specific nuclease in gene editing has revolutionized the field of DNA manipulation. Similarly, Cas13 as the effector protein of type VI provides a convenient tool for RNA manipulation. Additionally, the type V CRISPR—Cas system is another valuable resource with many subtypes and diverse functions. In their review, they summarize all the subtypes of the type V family that have been identified so far. According to the functions currently displayed by the type V family, they attempt to introduce the functional principle, current application status, and development prospects in biotechnology for all major members.

### BRIEF SUMMARY

[0013] It is an object of the present invention to provide an additional tool stemming from the above for the field of molecular diagnostics, as well as gene editing and therapy. Other objects and advantages will become apparent upon further studying the present specification with reference to the accompanying examples.

[0014] In a first aspect thereof, the object of the present invention is solved by providing a method for cleaving a nucleic acid molecule selected from dsDNA, ssDNA, and RNA, comprising the steps of a) providing at least one CasΩ nuclease enzyme, b) providing at least one preselected guide RNA, c) forming a complex between the least one CasΩ nuclease enzyme and the at least one preselected guide RNA, d) binding of the complex of c) to a target RNA based on the at least one preselected guide RNA, and e) cleaving said nucleic acid molecule selected from dsDNA, ssDNA, and RNA by the at least one CasΩ nuclease enzyme, wherein said at least one preselected guide RNA comprises a guide sequence that is at least 90% complementary to the target RNA.

[0015] In a second aspect thereof, the object of the present invention is solved by providing a complex comprising a CasΩ nuclease and at least one pre-selected guide RNA designed for binding to at least one target RNA. Preferred is the complex according to the present invention which further bound to a target RNA molecule having a guide sequence that is at least 90% complementary to said guide RNA, and wherein said target RNA is preferably flanked by at least one RNA protospacer adjacent motif (rPAM).

[0016] In a third aspect thereof, the object of the present invention is solved by providing a method for detecting at least one target RNA in a cell, tissue, cellular nucleus, and/or sample, said method comprising a) providing at least one ssDNA, dsDNA or RNA reporter nucleic acid in said cell, tissue, cellular nucleus, and/or sample, b) contacting said cell, tissue, cellular nucleus, and/or sample with at least one complex between at least one CasΩ nuclease enzyme and at least one preselected guide RNA, preferably according to the present invention as above, wherein said at least one preselected guide RNA comprises a guide sequence that is at least 90% complementary to the target RNA, and c) detecting a cleaving, cutting and/or nicking of said at least one ssDNA, dsDNA or RNA reporter nucleic acid, wherein detecting said cleaving the at least one reporter nucleic acid detects said at least one target RNA in said cell, tissue, cellular nucleus and/or sample.

[0017] In a fourth aspect thereof, the object of the present invention is solved by providing a method for modulating expression of at least one target RNA in a cell, tissue, cellular nucleus, and/or sample, wherein said at least one target RNA is selected from an mRNA, non-coding RNA and a viral RNA molecule, said method comprising: a) contacting said cell, tissue, cellular nucleus, and/or sample with at least one complex between at least one CasΩ nuclease enzyme and at least one preselected guide RNA, preferably according to the present invention as above, wherein said at least one preselected guide RNA comprises a guide sequence that is at least 90% complementary to the at least one target RNA, and c) binding the complex of b) to the at least one target RNA and thereby altering the stability, processing, or translation of the at least one target RNA, whereby the binding in c) modulates the expression of at least one target RNA in the cell, tissue, cellular nucleus, and/or sample.

[0018] In a fifth aspect thereof, the object of the present invention is solved by providing a method for editing the sequence of at least one target RNA in a cell, tissue, cellular nucleus, and/or sample, wherein said at least one target RNA is selected from an mRNA, non-coding RNA and a viral RNA molecule, said method comprising: a) contacting said cell, tissue, cellular nucleus, and/or sample with at least one complex between at least one modified and catalytically inactive CasΩ nuclease enzyme complexed with at least one RNA-modifying enzyme, preferably according to the present invention as above, and at least one preselected guide RNA, wherein said at least one preselected guide RNA comprises a guide sequence that is at least 90% complementary to the at least one target RNA, and c) binding the complex of b) to the at least one target RNA and editing of the at least one target RNA by said at least one RNA-modifying enzyme.

[0019] In a sixth aspect thereof, the object of the present invention is solved by providing the complex according to the present invention for use in the prevention and/or treatment of diseases, such as for example, for use in the prevention and/or treatment of infections and/or genetic disorder, such as proliferative disorders, such as cancer, fungal, protozoan, bacterial and/or viral infections.

[0020] In a seventh aspect thereof, the object of the present invention is solved by providing a method for specifically inactivating an undesired cell, comprising contacting said cell with a complex according to the present invention, wherein said guide RNA is specifically selected for said undesired cell to be inactivated. The method can be preferably used to select for cells that remain unedited using the method according to the present invention.

[0021] In an eighth aspect thereof, the object of the present invention is solved by providing a method for preventing and/or treating a disease, such as for example, an infection and/or genetic disorder, such as a proliferative disorder, such as cancer, fungal, protozoan, bacterial and/or viral infections, an autoimmune disease, comprising administering to a subject in need of such treatment an effective amount of the complex according to the present invention.

[0022] In a ninth aspect thereof, the object of the present invention is solved by providing a method for decontaminating a preparation from an undesired contaminant, such as fungal, protozoan, bacterial and/or viral contamination, comprising suitably administering to said preparation an effective amount of the complex according to the present invention, and thereby removing and/or reducing the undesired contaminant.

[0023] In a tenth aspect thereof, the object of the present invention is solved by providing a use of the complex according to the present invention for cleaving a nucleic acid molecule selected from dsDNA, ssDNA, and RNA, for detecting at least one target RNA in a cell, tissue, cellular nucleus, and/or sample, for modulating expression of at least one target RNA in a cell, tissue, cellular nucleus, and/or sample, for editing the sequence of at least one target RNA in a cell, tissue, cellular nucleus, and/or sample, for specifically inactivating an undesired cell or virus, or for decontaminating a preparation from an undesired contaminant.

### BRIEF DESCRIPTION OF THE FIGURES

[0024] The present invention will now be further described in the following examples with reference to the accompanying Figures, nevertheless, without wanting to be limited thereto. For the purposes of the present invention, all references as cited herein are incorporated by reference in their entireties. The present disclosure includes as sequence listing comprising SEQ ID Nos: 1 to 67 as part of the description, which is also incorporated by reference in its entirety.

[0025] FIG. 1 shows that CasΩ forms three distinct clades among Class 2 Type V CRISPR-Cas nucleases. Maximum likelihood phylogeny of Class 2 Type V CRISPR-Cas protein sequences was generated, including three distinct monophyletic CasΩ clades, as typified by the representative nucleases SmCasΩ, SuCasΩ, and ca40CasΩ. CasΩ nucleases do not share the last common ancestor with Cas12a. Transfer bootstrap (TBE) support values are shown at the nodes.

[0026] FIG. 2 shows amino acid conservation between the RuvC-I and RuvC-III motifs in CRISPR-SuCasΩ nucleases. Nuclease orthologues from the SuCasΩ phylogenetic clade exhibit unique amino acid composition, e.g., between the RuvC-I and RuvC-II catalytic motifs, comprising an insertion of multiple conserved amino acid motifs compared to non-CasΩ nucleases, such as Cas12a. Furthermore, SuCasΩ orthologues exhibit unique amino acid composition between the RuvC-II and RuvC-III catalytic motifs, comprising a deletion of amino acids compared to non-CasΩ nucleases, such as Cas12a. Relative entropy is shown in bits. High entropy indicates high certainty that a given amino acid is present in an orthologous motif based on the alignment of 16 SuCasΩ orthologues.

[0027] FIG. 3 shows amino acid conservation between the RuvC-I and RuvC-III motifs in CRISPR-SmCasΩ nucleases. Nuclease orthologues from the SmCasΩ phylogenetic clade exhibit unique amino acid composition, e.g., between the RuvC-I and RuvC-II catalytic motifs, comprising an insertion of multiple conserved amino acid motifs compared to non-CasΩ nucleases, such as Cas12a. Furthermore, SmCasΩ orthologues exhibit unique amino acid composition between the RuvC-II and RuvC-III catalytic motifs, comprising a deletion of amino acids compared to non-CasΩ nucleases, such as Cas12a. Relative entropy is shown in bits. High entropy indicates high certainty that a given amino acid is present in an orthologous motif based on the alignment of 36 SmCasΩ orthologues.

[0028] FIG. 4 shows amino acid conservation between the RuvC-I and RuvC-III motifs in CRISPR-ca40CasΩ nucleases. Nuclease orthologues from the ca40CasΩ phylogenetic clade exhibit unique amino acid composition, e.g., between the RuvC-I and RuvC-II catalytic motifs, comprising an insertion of multiple conserved amino acid motifs compared to non-CasΩ nucleases, such as Cas12a. Furthermore, ca40CasΩ orthologues exhibit unique amino acid composition between the RuvC-II and RuvC-III catalytic motifs, comprising a deletion of amino acids compared to non-CasΩ nucleases, such as Cas12a. Relative entropy is shown in bits. High entropy indicates high certainty that a given amino acid is present in an orthologous motif based on the alignment of 15 ca40CasΩ orthologues.

[0029] FIG. 5 shows that CasΩ recognizes RNA and cleaves RNA, ssDNA, and dsDNA in vitro. Purified SuCasΩ and a designed guide RNA (crRNA) were combined with an unlabeled target or non-target RNA as well as labeled non-target single stranded DNA (ssDNA), double-stranded DNA (dsDNA), and single stranded RNA (ssRNA). (A) Only in the presence of the RNA target did SuCasΩ degrade the non-target ssDNA, dsDNA, and ssRNA. (B) In the presence of non-target RNA, SuCasΩ did not degrade the ssDNA, dsDNA, and ssRNA. This activity (in particular, RNA target recognition and dsDNA collateral degradation) represents an entirely unique activity for CRISPR nucleases.

[0030] FIG. 6 shows that the RNA-triggered DNA degradation by CasΩ in vitro depends on the RuvC domain. SuCasΩ was mutated in two sites within the RuvC motifs associated with DNA cleavage. The cleavage assays were conducted as described in the previous figure. In this case, mutating the RuvC domain eliminated the RNA-triggered degradation of dsDNA.

[0031] FIG. 7 shows that CasΩ degrades ssDNA following RNA target recognition in vitro. RNA-triggered SuCasΩ activity was tested in vitro with ssDNA. The ssDNA was labeled with a fluorophore for fluorescence detection. The results show that ssDNA is also degraded by triggered SuCasΩ. Target ssDNA and dsDNA did not trigger SuCasΩ activity.

[0032] FIG. 8 shows that CasΩ degrades plasmid DNA following RNA target recognition in vitro. RNA-triggered SuCasΩ activity was tested in vitro with plasmid DNA. The plasmid was detected by running the nucleic acid products on an agarose gel and staining with ethidium bromide. The results show that plasmid DNA is also degraded by triggered SuCasΩ.

[0033] FIG. 9 shows that CasΩ impairs growth following target recognition in E. coli. The activity of SuCasΩ was assessed without selecting for the target plasmid or any plasmids. (A-B) Transformation-fold reduction when transforming the SuCasΩ plasmid into cells already harboring the crRNA plasmid and a target/non-target plasmid. Different PAMs and target mismatches were tested with or without selection for the target plasmid. SuCasΩ but not Cas12a reduced plasmid transformation even when not selecting for the target plasmid. (C) Assessing growth of E. coli cells expressing different nucleases under different selection conditions. SuCasΩ and LsCas13a but not LbCas12a reduced growth even in the absence of a selecting antibiotic. LsCas13a is known to collaterally degrade cellular RNAs upon target recognition, yielding a similar effect on growth. It is furthermore shown that CasΩ targeting elicits an SOS response, cytotoxicity, and loss of DNA in E. coli. The impact of targeting by SuCasΩ compared to other nucleases was further assessed in E. coli. (D) Measuring the SOS response using the recA promoter driving GFP expression. GFP fluorescence was measured after 4-h induction of the nuclease and guide RNA, all in the absence of a selecting antibiotic. Only SuCasΩ significantly elicited the SOS response compared to a non-target control. (E) Assessing cell morphology and DNA content. Cells were stained with the DNA binding dye DAPI and assessed by flow cytometry analysis. Only cells with SuCasΩ targeting led to a bifurcation in the population, with some cells becoming filamentous while others becoming small and containing less DNA. Both reflect extensive DNA damage.

[0034] FIG. 10 shows that CasΩ nucleases exhibit RNA-triggered collateral activity in TXTL. RNA-triggered SuCasΩ and SmCasΩ activity was tested in cell-free transcription-translation (TXTL) reactions with a non-target plasmid DNA encoding a fluorescent GFP reporter. SuCasΩ and SmCasΩ nucleases and crRNA were expressed from plasmids. Target RNA was either expressed or not expressed from separate plasmids in the reactions. The results show that RNA recognition by CasΩ nucleases leads to a reduction in GFP fluorescence attributed to the collateral degradation of the non-target GFP-expressing reporter plasmid.

### DETAILED DESCRIPTION

[0035] As mentioned above, in a first aspect thereof, the object of the present invention is solved by providing a method for cleaving a nucleic acid molecule selected from dsDNA, ssDNA, and RNA, comprising the steps of a) providing at least one CasΩ nuclease enzyme, b) providing at least one preselected guide RNA, c) forming a complex between the least one CasΩ nuclease enzyme and the at least one preselected guide RNA, d) binding of the complex of c) to a target RNA based on the at least one preselected guide RNA, and e) cleaving said nucleic acid molecule selected from dsDNA, ssDNA, and RNA by the at least one CasΩ nuclease enzyme. Preferably, the at least one preselected guide RNA comprises a guide sequence that is at least 90% complementary to the target RNA.

[0036] The present invention is based on the detection of an RNA target sequence by a CRISPR nuclease designated herein as CasΩ that utilizes a guide RNA to recognize complementary RNA sequence(s) flanked by an RNA PAM (rPAM) leading to the non-specific degradation (cleaving, cutting or nicking) of nucleic acids, including single-stranded DNA (ssDNA), double stranded DNA (dsDNA), and RNA. Given the structurally similarity to the established Cas nuclease Cas12a, CasΩ was presumed to target DNA.

[0037] The combination of RNA recognition and triggered collateral ssDNA, dsDNA, and RNA degradation as well as the recognition of an rPAM is unique amongst known Cas nucleases. It offers a clear advantage over other Cas nucleases used for molecular diagnostics, offers a unique means of achieving RNA interference and RNA editing, and opens first applications in sequence-specific counterselection and killing of bacteria, archaea, and eukaryotes.

[0038] Zetsche B, et al. (in: Cpf1 is a single RNA-guided endonuclease of a class 2 CRISPR-Cas system. Cell. 2015 Oct. 22; 163(3):759-71. doi: 10.1016/j.cell.2015.09.038. Epub 2015 Sep. 25. PMID: 26422227; PMCID: PMC4638220) report characterization of Cpf1, a putative class 2 CRISPR effector. They demonstrate that Cpf1 mediates robust DNA interference with features distinct from Cas9. Cpf1 is a single RNA-guided endonuclease lacking tracrRNA, and it utilizes a T-rich protospacer-adjacent motif. Moreover, Cpf1 cleaves DNA via a staggered DNA double-stranded break. Out of 16 Cpf1-family proteins, they identified two candidate enzymes from Acidaminococcus and Lachnospiraceae with efficient genome-editing activity in human cells.

[0039] A CasΩ enzyme is disclosed from Sulfuricurvum_sp_PC08-66.

[0040] Begemann, M. B., et al. (in: Characterization and validation of a novel group of Type V, Class 2 nucleases for in vivo genome editing. 2017. bioRxiv, pp. 1-9) present some evidence of enzymes and genome editing in plants. According to the results as produced in the context of the present inventors, it seems that the genomic deletions as observed were not due to DNA targeting, but rather resulted from the purifying selection in response to RNA targeting.

[0041] Makarova, K. S., et al. (in: Classification and Nomenclature of CRISPR-Cas Systems: Where from Here? 2018. The CRISPR journal, 1(5), pp. 325-336) disclose a CasΩ from the Sm clade (KFO67988.1) as a Cas12a variant, which was grouped with two other nucleases that seem not to be CasΩ.

[0042] Aliaga Goltsman, D. S. et al. (in: Novel Type V-A CRISPR Effectors Are Active Nucleases with Expanded Targeting Capabilities. 2020. The CRISPR journal, 3(6), pp. 454-461) classified a number of CasΩ nucleases from the Sm clade as Cas12a, namely Cas12a-M60-3, Cas12a-M60-1, Cas12a-M60-8, Cas12a-M60-9, Cas12a-M26-5, Cas12a-M26-14, and Cas12a-M26-15.

[0043] US 2019/0048357, which is incorporated by reference in its entirety, discloses a method of modifying a nucleotide sequence at a target site in the genome of a eukaryotic cell, preferably a plant cell. For this, a Cms1 polypeptide, or a polynucleotide encoding a Cms1 polypeptide and a DNA-targeting RNA, or a DNA polynucleotide encoding a DNA-targeting RNA, wherein the DNA-targeting RNA comprises: (a) a first segment comprising a nucleotide sequence that is complementary to a sequence in the target DNA; and (b) a second segment that interacts with a Cms1 polypeptide are introduced into the cell. The method requires to then modify said nucleotide sequence at said target site, and wherein said genome of a eukaryotic cell is a nuclear, plastid, or mitochondrial genome.

[0044] FIG. 1 of US 2019/0048357 shows a phylogenetic tree drawn from a RuvC-anchored MUSCLE alignment of the Type V nuclease amino acid sequences indicated. Sm-type, Sulf-type, and Unk40-type Cms1 nucleases are indicated. FIG. 2 then shows a summary of amino acid motifs shared among Sm-type Cms1 proteins. The weblogo figures in boxes 1-10 correspond to SEQ ID NOs: 177-186 of US 2019/0048357, respectively, and their locations on the SmCms1 protein (SEQ ID NO: 10 of US 2019/0048357) are shown. FIG. 3 shows a summary of amino acid motifs shared among Sulf-type Cms1 proteins. The weblogo figures in boxes 1-17 correspond to SEQ ID NOs: 288-289 and SEQ ID NOs: 187-201 of US 2019/0048357, respectively, and their locations on the SulfCms1 protein (SEQ ID NO: 11 of US 2019/0048357) are shown.

[0045] FIG. 4 shows a summary of amino acid motifs shared among Unk40-type Cms1 proteins. The weblogo figures in boxes 1-7 correspond to SEQ ID NOs: 290-296, respectively, and their locations on the Unk40Cms1 protein (SEQ ID NO:68) are shown.

[0046] Therefore, US 2019/0048357 in form of the Sm-type Cms1 proteins and the Sulf-type Cms1 proteins as well as the Unk40-type Cms1 discloses preferred examples of CasΩ nucleases according to the present invention. In the context of the present invention, the term CasΩ nuclease or CasΩ nuclease enzyme shall therefore include Cas nuclease polypeptides or respective functional fragments thereof that exhibit at least the following features;

[0047] a) CRISPR-associated single-effector nuclease enzyme with a RuvC domain consisting of at least one RuvC motif, more preferably two RuvC motifs, more preferably three RuvC motifs, and preferably no HNH or HEPN domains,

[0048] b) Unique amino acid composition between the RuvC-I and RuvC-II motifs, comprising an insertion of amino acids of one of three motifs compared with non-CasΩ nucleases,

[0049] c) Unique amino acid composition between the RuvC-II and RuvC-III motifs, comprising a deletion of amino acids compared with non-CasΩ nucleases,

[0050] d) Ability of the nuclease to process CRISPR RNA repeat without accessory factors (i.e., without tracrRNA and/or RNase III),

[0051] e) Nuclease recognizes single-stranded RNA as its unique nucleic-acid target,

[0052] f) Nuclease naturally targets RNA flanked by an rPAM, and

[0053] f) Recognition of the RNA leads to non-specific (non-sequence specific) cleavage of ssRNA, ssDNA, and/or dsDNA.

[0054] In the context of the present invention, the term CasΩ nuclease or CasΩ nuclease enzyme shall also include polypeptides having at least 50%, preferably at least 70, more preferably at least 80%, more preferably at least 90%, and more preferably at least 95% identity with a sequence selected from the group consisting of SEQ ID NOs: 10 or 11 or 68 as disclosed in US 2019/0048357, and having RNA-dependent CasΩ nuclease activity, i.e., non-specifically cleaving dsDNA, ssDNA, and/or RNA.

[0055] Preferred is a CasΩ nuclease or CasΩ nuclease enzyme of the Su-clade of enzymes (see FIG. 1), which thus includes the polypeptides having at least 80%, more preferably at least 90%, and more preferably at least 95% identity with the amino acid sequence according to SEQ ID NOs: 11 as disclosed in US 2019/0048357, and having RNA-dependent CasΩ nuclease activity, i.e., non-specifically cleaving dsDNA, ssDNA, and/or RNA.

[0056] CasΩ nuclease amino acid sequence alignments were examined to identify motifs within the protein sequences that are well-conserved among these nucleases. It was observed that CasΩ nucleases were found in three well-separated clades on the phylogenetic tree shown in FIG. 1. One of these clades includes Sm CasΩ (SEQ ID NO: 10 as disclosed in US 2019/0048357), another includes Su CasΩ (SEQ ID NO: 11 as disclosed in US 2019/0048357), and the third includes Unk40 (SEQ ID NO: 68 as disclosed in US 2019/0048357). Members of each of these clades were therefore aligned separately to identify partially and/or completely conserved amino acid motifs among these nucleases. For the alignment of Sm CasΩ nucleases, SEQ ID NOs: 10, 20, 23, 30, 32-34, 37-39, 41, 43, 44, 46-60, 67, 154-156, 208-211, 222, 223, 225, 228, 229, 232, 234, 236, 237, 241, 243, 245, 248, 250, 251, 253, and 254 as disclosed in US 2019/0048357 were aligned. For the alignment of Su CasΩ nucleases, SEQ ID NOs: 11, 21, 22, 31, 35, 36, 40, 42, 45, 61-66, 69, 227, 230, 231, 235, 239, 240, 242, 244, and 247 as disclosed in US 2019/0048357 were aligned. For the alignment of Unk40 CasΩ nucleases, SEQ ID NOs: 68, 224, 226, 233, 238, 246, 249, and 252 were aligned.

[0057] These alignments were performed in US 2019/0048357 using MUSCLE and the resulting alignments were examined manually to identify regions that showed conservation among all of the aligned proteins.

[0058] The amino acid (motifs) shown in present SEQ ID NOs: 32 to 67 were identified from the alignment of Sm CasΩ nucleases; the amino acid motifs shown in present SEQ ID NOs: 16 to 31 were identified from the alignment of Su CasΩ nucleases; the amino acid motifs shown in present SEQ ID NOs: 1 to 15 were identified from the alignment of ca40 (Unk40) CasΩ nucleases. Schematic diagrams showing the locations of these conserved motifs on the Sm CasΩ, and Su CasΩ protein sequences are presented in FIGS. 2-4.

[0059] The nucleases according to the present invention can also be distinguished/grouped based on the following (additional) features. The particularly preferred subgroup of SuCasΩ nucleases according to the present invention, in particular as shown in SEQ ID Nos. 16 to 31, as one distinguishing feature exhibits a unique amino acid composition between the RuvC-II and RuvC-III catalytic motifs, comprising a deletion of amino acids compared to non-CasΩ nucleases, such as Cas12a (see also FIG. 2). The subgroup of SmCasΩ nucleases according to the present invention, in particular as shown in SEQ ID Nos. 32 to 67, as one distinguishing feature exhibits a unique amino acid composition between the RuvC-II and RuvC-III catalytic motifs, comprising a deletion of amino acids compared to non-CasΩ nucleases, such as Cas12a. Finally, the subgroup of ca40CasΩ nucleases according to the present invention, in particular as shown in SEQ ID Nos. 1 to 15, as one distinguishing feature exhibits a unique amino acid composition between the RuvC-II and RuvC-III catalytic motifs, comprising a deletion of amino acids compared to non-CasΩ nucleases, such as Cas12a.

[0060] Particularly preferred CasΩ nuclease enzymes according to and to be used in accordance with the present invention have been identified as shown in the following table.

| CasΩ-clade/ | | | |
|---|---|---|---|
| SEQ ID NO: | Organism (if known) | Enzyme name, Accession number | notes |
| ca40 | Unknown | ca106CasΩ, Ga0232645_1000961 | SEQ 68 of US |
| (Unk40)/1 | | | 2019/0048357 |
| ca40 | Unknown | ca134CasΩ, Ga0451652_001661 | |
| (Unk40)/2 | | | |
| ca40 | Unknown | ca126CasΩ, Ga0153773_1000694 | |
| (Unk40)/3 | | | |
| ca40 | Unknown | ca40CasΩ, Ga0180009_10008218 | SEQ 300 of US |
| (Unk40)/4 | | | 2019/0048357 |
| ca40 | Unknown | ca48CasΩ, Ga0066649_10040698, | SEQ 224 of US |
| (Unk40)/5 | | Ga0066640_10036548 | 2019/0048357 |
| ca40 | Unknown | ca57CasΩ, Ace Lake Antarctica | SEQ 223 of US |
| (Unk40)/6 | | sample | 2019/0048357 |
| ca40 | Unknown | ca73CasΩ, Ga0209097_10004342 | SEQ 249 of US |
| (Unk40)/7 | | | 2019/0048357 |
| ca40 | Unknown | ca50CasΩ, | SEQ 226 of US |
| (Unk40)/8 | | TB_GS09_5DRAFT_1000006 | 2019/0048357 |
| ca40 | Unknown | ca62CasΩ, Ga0103269_100007 | SEQ 238 of US |
| (Unk40)/9 | | | 2019/0048357 |
| ca40 | Unknown | ca70CasΩ, Ga0209718_1004048 | SEQ 246 of US |
| (Unk40)/10 | | | 2019/0048357 |
| ca40 | Unknown | ca83CasΩ, Ga0256843_1010138 | |
| (Unk40)/11 | | | |
| ca40 | Unknown | ca76CasΩ, Ga0256840_1005709 | SEQ 252 of US |
| (Unk40)/12 | | | 2019/0048357 |
| ca40 | Unknown | ca82CasΩ, Ga0256834_1002422 | SEQ 23 of US |
| (Unk40)/13 | | | 2019/0048357 |
| ca40 | Unknown | CasΩ_MG60_1, Goltsman et al., | |
| (Unk40)/14 | | 2020 | |
| ca40 | Unknown | CasΩ_MG60_3, Goltsman et al., | |
| (Unk40)/15 | | 2020 | |
| Su CasΩ/16 | Unknown | ca37CasΩ, Ga0031101 | SEQ 65 of US |
| | | | 2019/0048357 |
| Su CasΩ/17 | Absconditabacteria | AbCasΩ, JABCPD020000008 | |
| Su CasΩ/18 | Unknown | ca14CasΩ, Ga0031091 | SEQ 42 of US |
| | | | 2019/0048357 |
| Su CasΩ/19 | Unknown | ca11CasΩ, Ga0003449 | SEQ 40 of US |
| | | | 2019/0048357 |
| Su CasΩ/20 | Unknown | ca33CasΩ, Ga0099364_10008519 | SEQ 61 of US |
| | | | 2019/0048357 |
| Su CasΩ/21 | Sulfuricurvum sp. PC08-66 | SuCasΩ, JQIT00000000.1 | SEQ 11 of US |
| | | | 2019/0048357 |
| Su CasΩ/22 | Unknown | ca35CasΩ, Ga0099364_10008519 | SEQ 63 of US |
| | | | 2019/0048357 |
| Su CasΩ/23 | Unknown | ca38CasΩ, Ga0026479 | SEQ 66 of US |
| | | | 2019/0048357 |
| Su CasΩ/24 | Unknown | ca7CasΩ, Ga0079224_1000149946 | SEQ 36 of US |
| | | | 2019/0048357 |
| Su CasΩ/25 | Unknown | ca6CasΩ, Ga0079223 | SEQ 35 of US |
| | | | 2019/0048357 |
| Su CasΩ/26 | Unknown | ca17CasΩ, Ga0123357_10004810 | SEQ 45 of US |
| | | | 2019/0048357 |
| Su CasΩ/27 | Unknown | ca34CasΩ, Ga0005846 | SEQ 62 of US |
| | | | 2019/0048357 |
| Su CasΩ/28 | Unknown | ca2CasΩ, Ga0025131 | SEQ 31 of US |
| | | | 2019/0048357 |
| Su CasΩ/29 | Unknown | ca36CasΩ, Ga0160425_10032006 | SEQ 64 of US |
| | | | 2019/0048357 |
| Su CasΩ/30 | Unknown | ca41CasΩ, Ga0066604_10155245 | SEQ 69 of US |
| | | and Ga0066603_10011461 and | 2019/0048357 |
| | | Ga0066603_10343056 | |
| Su CasΩ/31 | Unknown | ca125CasΩ, Ga0153773_1000694 | |
| Sm CasΩ/32 | Unknown | CasΩ_MG60_8, Goltsman et al., | |
| | | 2020 | |
| Sm CasΩ/33 | Unknown | ca24CasΩ, KVWGV2_combined | SEQ 52 of US |
| | | | 2019/0048357 |
| Sm CasΩ/34 | Gracilibacteria bacterium | GrCasΩ, RAL57497.1 | |
| | GN02-872 GN02_872_C01 | | |
| Sm CasΩ/35 | Unknown | CasΩ_MG26_5, Goltsman et al., | |
| | | 2020 | |
| Sm CasΩ/36 | Unknown | CasΩ_MG26_14, Goltsman et al., | |
| | | 2020 | |
| Sm CasΩ/37 | Unknown | CasΩ_MG26_15, Goltsman et al., | |
| | | 2020 | |
| Sm CasΩ/38 | Unknown | ca23CasΩ, Ga0069611 | SEQ 51 of US |
| | | | 2019/0048357 |
| Sm CasΩ/39 | Unknown | ca32CasΩ, Ga0031051 | SEQ 60 of US |
| | | | 2019/0048357 |
| Sm CasΩ/40 | Unknown | ca3CasΩ, Ga0070389 | SEQ 32 of US |
| | | | 2019/0048357 |
| Sm CasΩ/41 | Unknown | ca22CasΩ, Ga0172377_10049484 | SEQ 50 of US |
| | | | 2019/0048357 |
| Sm CasΩ/42 | Unknown | ca5CasΩ, Ga0074197 | SEQ 34 of US |
| | | | 2019/0048357 |
| Sm CasΩ/43 | Unknown | CasΩ_MG60_9, Goltsman et al., | |
| | | 2020 | |
| Sm CasΩ/44 | Unknown | ca28CasΩ, Ga0114934 | SEQ 56 of US |
| | | | 2019/0048357 |
| Sm CasΩ/45 | Bdellovibrionales bacterium | BdCasΩ, Ga0325881_105 | |
| | SP5DBV1 | | |
| Sm CasΩ/46 | Unknown | ca9CasΩ, Ga0116195 | SEQ 38 of US |
| | | | 2019/0048357 |
| Sm CasΩ/47 | Unknown | ca8CasΩ, Ga0116185 | SEQ 37 of US |
| | | | 2019/0048357 |
| Sm CasΩ/48 | Unknown | cal6CasΩ, a0066637 | SEQ 44 of US |
| | | | 2019/0048357 |
| Sm CasΩ/49 | Unknown | ca20CasΩ, Ga0172381_10024559 | SEQ 48 of US |
| | | | 2019/0048357 |
| Sm CasΩ/50 | Unknown | ca1CasΩ, Ga0066603 | SEQ 30 of US |
| | | | 2019/0048357 |
| Sm CasΩ/51 | Roizmanbacteria bacterium | Rb1CasΩ, LBTJ01000016 | SEQ 154 of US |
| | GW2011_GWA2_37_7 | | 2019/0048357 |
| | US54_C0016 | | |
| Sm CasΩ/52 | Roizmanbacteria bacterium | Rb2CasΩ, Ga0301324_1082 | |
| | CG | | |
| Sm CasΩ/53 | Unknown | ca25CasΩ, Ga0123348 and | SEQ 54 of US |
| | | Ga0123349 | 2019/0048357 |
| Sm CasΩ/54 | Unknown | ca39CasΩ, Ga0187907_10021093 | SEQ 67 of US |
| | | | 2019/0048357 |
| Sm CasΩ/55 | Unknown | ca21CasΩ, Ga0005846 | SEQ 49 of US |
| | | | 2019/0048357 |
| Sm CasΩ/56 | Unknown | ca26CasΩ, Ga0082212_10027777 | SEQ 54 of US |
| | | | 2019/0048357 |
| Sm CasΩ/57 | Bacteroidetes bacterium | Ba1CasΩ, HDR01000103, | |
| | | PKP47251.1 | |
| Sm CasΩ/58 | Unknown | ca27CasΩ, Ga0003456 | SEQ 55 of US |
| | | | 2019/0048357 |
| Sm CasΩ/59 | Unknown | ca31CasΩ, Ga003455 | SEQ 59 of US |
| | | | 2019/0048357 |
| Sm CasΩ/60 | Unknown | ca29CasΩ, Ga0123353_10032784 | SEQ 57 of US |
| | | | 2019/0048357 |
| Sm CasΩ/61 | Unknown | ca30CasΩ, Ga0005842 | SEQ 58 of US |
| | | | 2019/0048357 |
| Sm CasΩ/62 | Omnitrophica | OmCasΩ, Ga0156434_161 | SEQ 155 of US |
| | WOR_2 bacterium | | 2019/0048357 |
| | RIFOXYA2_FULL_38_17 | | |
| Sm CasΩ/63 | Bacteroidetes bacterium | Ba2CasΩ, Ga0139412_1053 | |
| Sm CasΩ/64 | Unknown | ca10CasΩ, Ga0012990 | SEQ 39 of US |
| | | | 2019/0048357 |
| Sm CasΩ/65 | Unknown | ca4CasΩ, Ga0070419_1441414 | SEQ 33 of US |
| | | | 2019/0048357 |
| Sm CasΩ/66 | Smithella sp. SCADC | Sm1CasΩ, Ga0057837_1120 | SEQ 10 of US |
| | | | 2019/0048357 |
| Sm CasΩ/67 | Smithella sp. SC_K08D17 | Sm2CasΩ, Ga0069545_1011 | SEQ 156 of US |
| | | | 2019/0048357 |

[0061] The positions of the RuvC motifs for the nucleases were identified as follows:

| CasΩ- | RuvC-I | RuvC-I | RuvC-II | RuvC-II | RuvC-III | RuvC-III |
|---|---|---|---|---|---|---|
| clade/SE | start | end | start | end | start | end |
| Ω ID NO: | (aa) | (aa) | (aa) | (aa) | (aa) | (aa) |
| ca40 | 760 | 766 | 1015 | 1021 | 1156 | 1162 |
| (Unk40)/1 | | | | | | |
| ca40 | 708 | 714 | 965 | 971 | 1109 | 1115 |
| (Unk40)/2 | | | | | | |
| ca40 | 822 | 828 | 1035 | 1041 | N/A | N/A |
| (Unk40)/3 | | | | | | |
| ca40 | 725 | 731 | 935 | 941 | 1139 | 1145 |
| (Unk40)/4 | | | | | | |
| ca40 | 731 | 737 | 936 | 942 | 1137 | 1143 |
| (Unk40)/5 | | | | | | |
| ca40 | 746 | 752 | 957 | 963 | 1159 | 1165 |
| (Unk40)/6 | | | | | | |
| ca40 | 766 | 772 | 887 | 893 | 1100 | 1106 |
| (Unk40)/7 | | | | | | |
| ca40 | 696 | 702 | 881 | 887 | 1078 | 1084 |
| (Unk40)/8 | | | | | | |
| ca40 | 668 | 674 | 854 | 860 | 1061 | 1067 |
| (Unk40)/9 | | | | | | |
| ca40 | 669 | 675 | 855 | 861 | 1065 | 1071 |
| (Unk40)/10 | | | | | | |
| ca40 | 687 | 693 | 873 | 879 | 1014 | 1020 |
| (Unk40)/11 | | | | | | |
| ca40 | 788 | 794 | 998 | 1004 | 1172 | 1178 |
| (Unk40)/12 | | | | | | |
| ca40 | 763 | 769 | 984 | 990 | 1152 | 1158 |
| (Unk40)/13 | | | | | | |
| ca40 | 794 | 800 | 922 | 928 | 1074 | 1080 |
| (Unk40)/14 | | | | | | |
| ca40 | 797 | 803 | 931 | 937 | 1093 | 1099 |
| (Unk40)/15 | | | | | | |
| Su | 873 | 879 | 1084 | 1090 | 1280 | 1286 |
| CasΩ/16 | | | | | | |
| Su | 866 | 872 | 1077 | 1083 | 1271 | 1277 |
| CasΩ/17 | | | | | | |
| Su | 526 | 532 | 737 | 743 | 895 | 901 |
| CasΩ/18 | | | | | | |
| Su | 874 | 880 | 1071 | 1077 | 1219 | 1225 |
| CasΩ/19 | | | | | | |
| Su | 862 | 868 | 1062 | 1068 | 1235 | 1241 |
| CasΩ/20 | | | | | | |
| Su | 845 | 851 | 1060 | 1066 | 1210 | 1216 |
| CasΩ/21 | | | | | | |
| Su | 848 | 854 | 1063 | 1069 | 1254 | 1260 |
| CasΩ/22 | | | | | | |
| Su | 858 | 864 | 1073 | 1079 | 1264 | 1270 |
| CasΩ/23 | | | | | | |
| Su | 850 | 856 | 1056 | 1062 | 1217 | 1223 |
| CasΩ/24 | | | | | | |
| Su | 853 | 859 | 1076 | 1082 | 1229 | 1235 |
| CasΩ/25 | | | | | | |
| Su | 651 | 657 | 852 | 858 | 1007 | 1013 |
| CasΩ/26 | | | | | | |
| Su | 853 | 859 | 1076 | 1082 | 1248 | 1254 |
| CasΩ/27 | | | | | | |
| Su | 862 | 868 | 1089 | 1095 | 1260 | 1266 |
| CasΩ/28 | | | | | | |
| Su | 869 | 875 | 1095 | 1101 | 1269 | 1275 |
| CasΩ/29 | | | | | | |
| Su | 867 | 873 | 1150 | 1156 | 1319 | 1325 |
| CasΩ/30 | | | | | | |
| Su | 972 | 978 | 1260 | 1266 | N/A | N/A |
| CasΩ/31 | | | | | | |
| Sm | 822 | 828 | 1051 | 1057 | 1166 | 1172 |
| CasΩ/32 | | | | | | |
| Sm | 751 | 757 | 990 | 996 | 1142 | 1148 |
| CasΩ/33 | | | | | | |
| Sm | 683 | 689 | 926 | 932 | 1089 | 1095 |
| CasΩ/34 | | | | | | |
| Sm | 572 | 578 | 798 | 804 | 967 | 973 |
| CasΩ/35 | | | | | | |
| Sm | 703 | 709 | 931 | 937 | 1083 | 1089 |
| CasΩ/36 | | | | | | |
| Sm | 703 | 709 | 931 | 937 | 1083 | 1089 |
| CasΩ/37 | | | | | | |
| Sm | 758 | 764 | 973 | 979 | 1108 | 1114 |
| CasΩ/38 | | | | | | |
| Sm | 819 | 825 | 1030 | 1036 | 1179 | 1185 |
| CasΩ/39 | | | | | | |
| Sm | 724 | 730 | 948 | 954 | 1064 | 1070 |
| CasΩ/40 | | | | | | |
| Sm | 791 | 797 | 1022 | 1028 | 1143 | 1149 |
| CasΩ/41 | | | | | | |
| Sm | 738 | 744 | 973 | 979 | 1090 | 1096 |
| CasΩ/42 | | | | | | |
| Sm | 773 | 779 | 1012 | 1018 | 1145 | 1151 |
| CasΩ/43 | | | | | | |
| Sm | 766 | 772 | 1024 | 1030 | 1141 | 1147 |
| CasΩ/44 | | | | | | |
| Sm | 799 | 805 | 1047 | 1053 | 1195 | 1201 |
| CasΩ/45 | | | | | | |
| Sm | 699 | 705 | 959 | 965 | 1087 | 1093 |
| CasΩ/46 | | | | | | |
| Sm | 675 | 681 | 912 | 918 | 1024 | 1030 |
| CasΩ/47 | | | | | | |
| Sm | 640 | 646 | 871 | 877 | 996 | 1002 |
| CasΩ/48 | | | | | | |
| Sm | 724 | 730 | 954 | 960 | 1066 | 1072 |
| CasΩ/49 | | | | | | |
| Sm | 767 | 773 | 1010 | 1016 | 1128 | 1134 |
| CasΩ/50 | | | | | | |
| Sm | 693 | 699 | 919 | 925 | 1037 | 1043 |
| CasΩ/51 | | | | | | |
| Sm | 692 | 698 | 919 | 925 | 1060 | 1066 |
| CasΩ/52 | | | | | | |
| Sm | 729 | 735 | 1046 | 1052 | 1146 | 1152 |
| CasΩ/53 | | | | | | |
| Sm | 733 | 739 | 1049 | 1055 | 1150 | 1156 |
| CasΩ/54 | | | | | | |
| Sm | 732 | 738 | 980 | 986 | 1085 | 1091 |
| CasΩ/55 | | | | | | |
| Sm | 723 | 729 | 1041 | 1047 | 1146 | 1152 |
| CasΩ/56 | | | | | | |
| Sm | 709 | 715 | 1029 | 1035 | 1134 | 1140 |
| CasΩ/57 | | | | | | |
| Sm | 729 | 735 | 1045 | 1051 | 1152 | 1158 |
| CasΩ/58 | | | | | | |
| Sm | 752 | 758 | 1069 | 1075 | 1170 | 1176 |
| CasΩ/59 | | | | | | |
| Sm | 719 | 725 | 1031 | 1037 | 1163 | 1169 |
| CasΩ/60 | | | | | | |
| Sm | 736 | 742 | 1052 | 1058 | 1163 | 1169 |
| CasΩ/61 | | | | | | |
| Sm | 724 | 730 | 936 | 942 | 1050 | 1056 |
| CasΩ/62 | | | | | | |
| Sm | 897 | 903 | 1177 | 1183 | 1321 | 1327 |
| CasΩ/63 | | | | | | |
| Sm | 669 | 675 | 893 | 899 | 1018 | 1024 |
| CasΩ/64 | | | | | | |
| Sm | 741 | 747 | 966 | 972 | 1088 | 1094 |
| CasΩ/65 | | | | | | |
| Sm | 698 | 704 | 919 | 925 | 1042 | 1048 |
| CasΩ/66 | | | | | | |
| Sm | 698 | 704 | 923 | 929 | 1063 | 1069 |
| CasΩ/67 | | | | | | |

[0062] The method according to the present invention then provides at least one preselected guide RNA designed for binding to at least one target RNA. Successful binding and recognition of the target RNA provides the signal that then leads to degradation of nucleic acids, such as DNA and RNA.

[0063] The parts of the nucleic acid molecules as used in the methods of the present invention that hybridize are complementary to at least 80%, preferably complementary to more than 90%, more preferably to more than 95%, and most preferably are 100% complementary to each other. Thus, the nucleotide sequence of said portion/part of said guide RNA that specifically hybridizes with the target RNA preferably excluding the rPAM can be produced and/or modified in order to be complementary to at least 80%, preferably complementary to more than 90%, more preferably to more than 95%, and most preferably are 100% complementary to the target RNA.

[0064] Certain portions of the nucleic acid molecules as used in the methods according to the present invention are found and/or designed to specifically hybridize with complementary portions in other molecules. As known to the person of skill, for this, the hybridization and washing conditions are critical. If the sequences are 100% complementary, then a high stringency hybridization may be carried out. Nevertheless, according to the invention, the portions that hybridize and/or specifically hybridize are complementary to at least 80%, preferably complementary to more than 90%, more preferably to more than 95%, and most preferably are 100% complementary. The stringency of hybridization is determined by the hybridization temperature and the salt concentration in the hybridization buffer, and high temperature and low salt is more stringent. A commonly used washing solution is SSC (Saline Sodium Citrate, a mixture of NaCitrate and NaCl). Hybridization may be carried out in solution or—more commonly—at least one component may be on a solid-phase support, e.g., nitrocellulose paper. Frequently used protocols employ a blocking reagent, such as casein from nonfat dried milk or bovine serum albumin, often in combination with denatured, fragmented salmon sperm DNA (or any other heterologous DNA of high complexity) and a detergent, such as SDS. Often a very high concentration of SDS is used as a blocking agent. Temperatures may be between 42 and 65° C. or higher, and buffers may be 3×SSC, 25 mM HEPES, pH 7.0, 0.25% SDS final.

[0065] Preferred is a method according to the present invention, wherein said portion of the said preselected guide RNA designed for binding to at least one target RNA specifically hybridizes with the target RNA with 15 or more nucleotides, preferably with 18 and more nucleotides, and more preferred with about 20 nucleotides or more. Preferred ranges are between 15 and 30 nucleotides, more preferred 18 to 25 nucleotides, and most preferred 20 to 24 nucleotides. Extensions to the hybridizing portions in the complex (3′ of the guide), are possible and preferred, and provide the advantage of a more stable formation the complex.

[0066] Further preferred is a method according to the present invention, wherein the target RNA comprises an rPAM (see above). In a preferred embodiment of the methods according to the present invention, the Cas nuclease can be modified in order to recognize a broader panel of rPAM sites, e.g., by replacing the key region in the interaction (PI) domain of Cas with the corresponding region in a panel of related Cas orthologs (see for example, for Cas9, Ma et al., Engineer chimeric Cas9 to expand PAM recognition based on evolutionary information. Nat Commun. 2019 Feb. 4; 10(1):560. doi: 10.1038/s41467-019-08395-8). This broadens the possible RNA targets in cells.

[0067] In the next step of the method according to the present invention the complex as formed between the least one CasΩ nuclease enzyme and the at least one preselected guide RNA as above is bound to the target RNA based on the sequence as designed for the preselected guide RNA as mentioned above. The CasΩ enzymes bind target nucleic acid independently of their ability to cleave target nucleic acid, and this flexibility is used in order to bind said at least one target RNA.

[0068] In the context of the present invention, a target RNA is any RNA of interest to be used as a trigger to cause cleaving and/or to be detected using the methods according to the present invention. Usually and preferably, the target RNA is a single-stranded RNA molecule, such as a messenger RNA, ribosomal RNAs, transfer RNAs, small RNAs, antisense RNAs, small nucleolar RNAs, microRNAs, piwiRNAs, long non-coding RNAs, spliced introns, and circular RNAs. The RNA can be of natural origin or artificially produced. The single stranded sensed RNA can be from a human cell, an animal cell, a plant cell, a cancerous cell, an infected cell, or a diseased cell, and/or can be derived from a virus, a parasite, a helminth, a fungus, a protozoan, a bacterium, or a pathogenic bacterium. The target RNA comprises a sequence that specifically hybridizes with a portion of the (non-naturally occurring) guide RNA as generated and used in the methods of the present invention.

[0069] Preferred is the complex according to the present invention, wherein said guide RNA comprises a sequence selected to be specific for a bacterium, a sequence selected to be specific for a virus, a sequence selected to be specific for a fungus, a sequence selected to be specific for a protozoan, a sequence selected to be specific for a genetic disorder, and a sequence selected to be specific for a proliferative disorder. Usually, said sequence is a complement or partial complement to the above target RNA.

[0070] In the last step of the method according to the present invention, the at least one CasΩ nuclease enzyme is cleaving (i.e., cutting, cleaving and/or nicking) nucleic acid molecules selected from dsDNA, ssDNA, and RNA. In contrast to the above mentioned “trigger” of specific RNA-binding to the target RNA, the nuclease-activity is non-specific. In contrast to other Cas-nucleases, like Cas13a (C2c2), that possesses an RNA-triggered non-specific RNase activity, and the type V effector protein, Cas12a, that possesses a dsDNA-triggered non-specific ssDNase activity, the present Cas-nuclease CasΩ possesses an RNA-triggered non-specific nuclease activity (see also Varble A, Marraffini L A. Three New Cs for CRISPR: Collateral, Communicate, Cooperate. Trends Genet. 2019; 35(6):446-456. doi: 10.1016/j.tig.2019.03.009).

[0071] The methods according to the present invention can be performed in vivo or in vitro, for example in an organism, a cell, tissue, and/or part thereof, like a nucleus, or in an in vitro assay, like a diagnostic assay.

[0072] As mentioned above, in a second aspect thereof, the object of the present invention is solved by providing a complex comprising a CasΩ nuclease and at least one pre-selected guide RNA that, preferably specifically, is designed for binding to at least one target RNA. Preferred is the complex according to the present invention which further bound to a target RNA molecule having a sequence that is to at least 80%, preferably to more than 90%, more preferably to more than 95%, and most preferably 100% complementary to said guide RNA, and wherein said target RNA is preferably flanked by at least one rPAM.

[0073] The CasΩ nuclease can be selected from the above mentioned enzymes, as well as from fragments thereof that maintain the RNA-dependent nuclease activity as disclosed herein, i.e., fragments at least maintaining the RuvC domain. The polypeptide of the CasΩ nuclease can be provided depending form the use as intended, e.g., in vivo or in vitro, and is synthetically produced, generated by in vitro transcription, and/or cloned into a plasmid. The enzyme may be provided as purified or essentially purified isolated enzyme preparation. Complexes according to the present invention may also be prepared by a mixture of CasΩ nucleases, e.g., two or three or more nucleases or the fragments thereof as described.

[0074] Thus, the CasΩ polypeptide as used can be wild type CasΩ polypeptide, modified CasΩ polypeptide, or a fragment of a wild type or modified CasΩ polypeptide. The CasΩ polypeptide can be modified to increase nucleic acid binding affinity and/or specificity, alter an enzymatic activity, and/or change another property of the protein. For example, nuclease (i.e., DNase, RNase) domains of the CasΩ polypeptide can be modified, deleted, or inactivated. Alternatively, the CasΩ polypeptide can be truncated to remove domains that are not essential for the function of the protein, i.e., preferably the RNA-dependent nuclease activity.

[0075] Fusion proteins are provided herein comprising a CasΩ polypeptide, or a fragment or variant thereof, and an effector domain. The CasΩ polypeptide can be directed to a target site by a guide RNA, at which site the effector domain can modify or effect the targeted nucleic acid sequence. The effector domain can be a cleavage domain, an RNA modifying domain, a translational activation domain, a translational repressor domain, a processing/splicing factor, a domain affecting RNA localization, or a domain that recruits proteins affecting any of these functions. The fusion protein can further comprise at least one additional domain chosen from a nuclear localization signal, plastid signal peptide, mitochondrial signal peptide, signal peptide capable of protein trafficking to multiple subcellular locations, a cell-penetrating domain, or a marker domain, any of which can be located at the N-terminus, C-terminus, or an internal location of the fusion protein. The CasΩ polypeptide can be located at the N-terminus, the C-terminus, or in an internal location of the fusion protein. The CasΩ polypeptide can be directly fused to the effector domain, or can be fused with a linker. In specific embodiments, the linker sequence fusing the CasΩ polypeptide with the effector domain can be at least 1, 2, 3, 4, 5, 6, 7, 8, 9, 10, 15, 20, 25, 30, 40, or 50 amino acids in length. For example, the linker can range from 1-5, 1-10, 1-20, 1-50, 2-3, 3-10, 3-20, 5-20, or 10-50 amino acids in length. The CasΩ polypeptide can also recruit the effector through a binding domain.

[0076] Preferred is the complex according to the present invention, wherein said nuclease comprises a nuclear localization signal. Said fusion nuclease comprising a nuclear localization signal and the complex as described herein as formed therewith are other embodiments of the present invention.

[0077] In some embodiments, the CasΩ polypeptide of the fusion protein can be derived from a wild type CasΩ protein. The CasΩ-derived protein can be a modified variant or a fragment. In some embodiments, the CasΩ polypeptide can be modified to contain a nuclease domain (e.g., a RuvC or RuvC-like domain) with reduced or eliminated nuclease activity. The nuclease domain can be modified by one or more deletion mutations, insertion mutations, and/or substitution mutations using known methods, such as site-directed mutagenesis, PCR-mediated mutagenesis, and total gene synthesis, as well as other methods known in the art.

[0078] The complex or complexes then comprise at least one pre-selected guide RNA that, preferably specifically, is designed for binding to at least one target RNA. How to design and choose the sequence(s) of the guide RNA generally depends on the sequence of the target RNA and the assay conditions; and how to design and choose such sequences is known to the person of skill in the art.

[0079] Preferred is the complex according to the present invention wherein said guide RNA molecule comprises a sequence that is to at least 80%, preferably to more than 90%, more preferably to more than 95%, and most preferably 100% complementary to a target RNA, and wherein said target RNA is preferably flanked by at least one rPAM. The guide RNA can be designed for binding to at least one target RNA, derived from naturally occurring sequences that are then modified in order to generate sequences in the molecule as desired. The guide RNA can further comprise additional modifications, such as labels or modified nucleotides, e.g., inosines, or the like. In case of both a naturally-occurring and/or a non-naturally occurring guide RNA, this can be produced in accordance with standard methods, e.g., synthetically produced, generated by in vitro transcription, and/or cloned into a plasmid or plasmids or other suitable vectors.

[0080] The parts of the nucleic acid molecules as used in the methods of the present invention that hybridize are complementary to at least 80%, preferably complementary to more than 90%, more preferably to more than 95%, and most preferably are 100% complementary to each other. Thus, the nucleotide sequence of said portion/part of said guide RNA that specifically hybridizes with the target RNA can be produced and/or modified in order to be complementary to at least 80%, preferably complementary to more than 90%, more preferably to more than 95%, and most preferably are 100% complementary to the target RNA.

[0081] Certain portions of the nucleic acid molecules as used in the methods according to the present invention are found and/or designed to specifically hybridize with complementary portions in other molecules. As known to the person of skill, for this, the hybridization and washing conditions are critical. If the sequences are 100% complementary, then a high stringency hybridization may be carried out. Nevertheless, according to the invention, the portions that hybridize and/or specifically hybridize are complementary to at least 80%, preferably complementary to more than 90%, more preferably to more than 95%, and most preferably are 100% complementary. The stringency of hybridization is determined by the hybridization temperature and the salt concentration in the hybridization buffer, and high temperature and low salt is more stringent. A commonly used washing solution is SSC (Saline Sodium Citrate, a mixture of NaCitrate and NaCl). Hybridization may be carried out in solution or—more commonly—at least one component may be on a solid-phase support, e.g., nitrocellulose paper. Frequently used protocols employ a blocking reagent, such as casein from nonfat dried milk or bovine serum albumin, often in combination with denatured, fragmented salmon sperm DNA (or any other heterologous DNA of high complexity) and a detergent, such as SDS. Often a very high concentration of SDS is used as a blocking agent. Temperatures may be between 42 and 65° C. or higher, and buffers may be 3×SSC, 25 mM HEPES, pH 7.0, 0.25% SDS final.

[0082] Preferred is a method according to the present invention, wherein said portion of the said preselected guide RNA designed for binding to at least one target RNA specifically hybridizes with the target RNA with 15 or more nucleotides, preferably with 18 and more nucleotides, and more preferred with about 20 nucleotides or more. Preferred ranges are between 15 and 30 nucleotides, more preferred 18 to 25 nucleotides, and most preferred 20 to 24 nucleotides. Extensions to the hybridizing portions in the complex (3′ of the guide), are possible and preferred, and provide the advantage of a more stable formation the complex.

[0083] The guide RNA can be further modified, preferably in order to introduce enhanced or new functionalities. For example, the 5′ and/or 3′ end of the guide RNA can be extended to be perfectly complementary to the target RNA, creating a dsRNA that can be edited with RNA-modifying enzymes (e.g., ADARs). The structure of the conserved CasΩ handle motif 5′ to the guide motif can be modified in order to stabilize the recognized hairpin structure or to promote binding by CasΩ. The 5′ and/or 3′ end of the guide RNA can be extended to further incorporate aptamer sequences. These aptamers can then recognize peptide or protein ligands fused to effector domains as used. Aptamers and their applications are well known in the art (see, for example, Rabiee N, Ahmadi S, Arab Z, Bagherzadeh M, Safarkhani M, Nasseri B, Rabiee M, Tahriri M, Webster T J, Tayebi L. Aptamer Hybrid Nanocomplexes as Targeting Components for Antibiotic/Gene Delivery Systems and Diagnostics: A Review. Int J Nanomedicine. 2020 Jun. 17; 15:4237-4256. doi: 10.2147/IJN.S248736. PMID: 32606675; PMCID: PMC7314593).

[0084] The complex according to the present invention is finally formed between the at least one CasΩ nuclease enzyme, and the at least one preselected guide RNA as above bound to the target RNA based on the sequence as designed for the preselected guide RNA as mentioned above. The CasΩ enzymes bind target nucleic acid independently of their ability to cleave target nucleic acid, and this flexibility is used in order to bind said at least one target RNA.

[0085] In the context of the present invention, a target RNA is any RNA of interest to be used as a trigger to cause cleaving and/or to be detected using the methods according to the present invention. Usually and preferably, the target RNA is a single-stranded RNA molecule, such as a messenger RNA, ribosomal RNAs, transfer RNAs, small RNAs, antisense RNAs, small nucleolar RNAs, microRNAs, piwiRNAs, long non-coding RNAs, spliced introns, and circular RNAs. The RNA can be of natural origin or artificially produced. The single stranded sensed RNA can be from a human cell, an animal cell, a plant cell, a cancerous cell, an infected cell, or a diseased cell, and/or can be derived from a virus, a parasite, a helminth, a fungus, a protozoan, a bacterium, or a pathogenic bacterium. As above, the target RNA comprises a sequence that specifically hybridizes with the guide portion of the (non-naturally occurring) guide RNA as generated and used in the methods of the present invention.

[0086] Another important aspect of the present invention is the diagnostic use of the complex and methods of the present invention. This aspect solves the object of the present invention by providing a method for detecting at least one target RNA in a cell, tissue, cellular nucleus, and/or sample, said method comprising: a) providing at least one ssDNA, dsDNA or RNA reporter nucleic acid in said cell, tissue, cellular nucleus, and/or sample, b) contacting said cell, tissue, cellular nucleus, and/or sample with at least one complex between at least one CasΩ nuclease enzyme and at least one preselected guide RNA, wherein said at least one preselected guide RNA comprises a guide sequence that is at least 90% complementary to the target RNA, and c) detecting a cleaving, cutting and/or nicking of said at least one ssDNA, dsDNA or RNA reporter nucleic acid, wherein detecting said cleaving the at least one reporter nucleic acid detects said at least one target RNA in said cell, tissue, cellular nucleus and/or sample.

[0087] As mentioned above, the parts of the nucleic acid molecules as used in the methods of the present invention that hybridize are complementary to at least 80%, preferably complementary to more than 90%, more preferably to more than 95%, and most preferably are 100% complementary to each other. Thus, the nucleotide sequence of said guide portion/part of said guide RNA that specifically hybridizes with the target RNA can be produced and/or modified in order to be complementary to at least 80%, preferably complementary to more than 90%, more preferably to more than 95%, and most preferably are 100% complementary to the target RNA.

[0088] When applying the respective complementarity and assay conditions, the present method can be used in order to detect mutations in the target RNA, but also RNAs that are undesired, present at a higher level in the cell or sample, and/or are foreign, such as, for example, from a human cell, an animal cell, a plant cell, a cancerous cell, an infected cell, or a diseased cell, and/or can be derived from a virus, a parasite, a helminth, a fungus, a protozoan, a bacterium, or a pathogenic bacterium.

[0089] In a preferred embodiment of the methods according to the present invention, said at least one target RNA is derived from a virus selected from Zika virus, human immunodeficiency virus (HIV), hepatitis B virus, hepatitis C virus, herpes virus, coronavirus, influenza, herpes simplex virus I, herpes simplex virus II, Papillomavirus, rabies virus, cytomegalovirus, human serum parvo-like virus, respiratory syncytial virus, varicella-zoster virus, measles virus, adenovirus, human T-cell leukemia viruses, Epstein-Barr virus, murine leukemia virus, mumps virus, vesicular stomatitis virus, Sindbis virus, lymphocytic choriomeningitis virus, wart virus, blue tongue virus, Sendai virus, feline leukemia virus, reovirus, polio virus, simian virus 40, mouse mammary tumor virus, dengue virus, rubella virus, west Nile virus, coronavirus, and yellow fever virus.

[0090] In a preferred embodiment of the methods according to the present invention, said at least one target RNA is derived from a pathogenic bacterium selected from Mycobacterium tuberculosis, Streptococcus agalactiae, methicillin-resistant Staphylococcus aureus, Legionella pneumophila, Streptococcus pyogenes, Escherichia coli, Neisseria gonorrhoeae, Neisseria meningitidis, Pneumococcus, Cryptococcus neoformans, Treponema pallidum, Lyme disease spirochetes, Pseudomonas aeruginosa, Mycobacterium leprae, and Brucella abortus.

[0091] Preferred is the method according to the present invention, wherein the at least one target RNA is a mutated target RNA comprising at least one mutation compared to a control target RNA.

[0092] In a preferred embodiment of the methods according to the present invention, the at least one target RNA is derived from a gene the transcription and/or expression thereof is modified in response to external factors, such as, for example, metabolic factors or signals, hormones, pathogens, toxins, drugs, ageing and/or biotic or abiotic stress.

[0093] In a preferred embodiment of the methods according to the present invention, the target RNAs are selected to be environment, species, strain, disease, cell- and/or tissue specific. In this aspect, the methods of the invention help to identify and/or to group cells or organisms based on the target RNAs as selected. The at least one target RNA is preferably related to a condition selected from a viral infection, such as, for example, coronavirus infection, infection with a pathogen, a metabolic disease, cancer, neurodegenerative diseases, ageing, a drug, and biotic or abiotic stress.

[0094] In a further preferred embodiment of the methods according to the present invention, the at least one target RNA can be added to said cell, tissue and/or sample prior to step a), and/or wherein said method further comprises at least one step selected from in vitro transcription of DNA into RNA, reverse transcription of RNA into DNA, and—optimally—subsequent in vitro transcription of said DNA into RNA. This can be done in order to provide suitable or desired signal amplification. Usually, the target RNA in said cell, tissue or sample is present in a range of from about 500 fM to about 1 uM, e.g., from about 500 fM to about 1 nM, preferably is present in a range of from about 1 pM to about 1 nM. Optimally, the method can detect a single molecule per cell, tissue and/or sample.

[0095] Given the broad applicability of sequence-specific RNA recognition triggering DNA degradation, CasΩ nucleases provide several advantages. The COVID-19 pandemic has highlighted the need for inexpensive and rapid diagnostics that can detect even single-nucleotide differences. Even after the pandemic subsides, society will be more aware of the benefits of diagnostics and accepting of their use in everyday settings (e.g., the airport). CasΩ nucleases recognize a specific RNA target sequence, leading to degradation of, for example, a ssDNA or dsDNA or RNA reporter. The readout can be fluorescent (e.g., cleaving a reporter fused to a fluorophore and a quencher) or colorimetric (e.g., release of a nanoparticle as part of a lateral flow assay). The sequence-specificity of CasΩ nucleases allow the diagnostic assay to differentiate even a single-nucleotide change, in a target RNA such as those associated with viral, in particular SARS-CoV-2, variants. Current CRISPR technologies based on Cas12a or Cas13 rely on recognition of dsDNA or ssRNA targets, triggering collateral cleavage of ssDNA or ssRNA reporters.

[0096] Smith C W, et al. (in: Probing CRISPR-Cas12a Nuclease Activity Using Double-Stranded DNA-Templated Fluorescent Substrates. Biochemistry. 2020 Apr. 21; 59(15):1474-1481. doi: 10.1021/acs.biochem.0c00140. Epub 2020 Apr. 7. PMID: 32233423; PMCID: PMC7384386) report a dsDNA substrate (probe-full) for probing Cas12a trans-cleavage activity upon target detection. A diverse set of Cas12a substrates with alternating dsDNA character were designed and studied using fluorescence spectroscopy. Smith et al. observed that probe-full without any nick displayed trans-cleavage performance that was better than that of the form that contains a nick. Different experimental conditions of salt concentration, target concentration, and mismatch tolerance were examined to evaluate the probe performance. The activity of Cas12a was programmed for a dsDNA frame copied from a tobacco curly shoot virus (TCSV) or hepatitis B virus (HepBV) genome by using crRNA against TCSV or HepBV, respectively. While on-target activity offered detection of as little as 10 pM dsDNA target, off-target activity was not observed even at 1 nM control DNAs. They demonstrated that trans-cleavage of Cas12a is not limited to ssDNA substrates, and Cas12a-based diagnostics can be extended to dsDNA substrates. However, this mode of detection still required a dsDNA target and therefore cannot detect an RNA target unless a reverse-transcription step is added beforehand.

[0097] There are other standard diagnostic technologies, such as PCR and LAMP. Another advantage of the present technologies is that they can be performed using lateral flow assays. The current technology can also provide single-nucleotide resolution normally associated with Cas nucleases, which are more difficult to achieve with PCR or LAMP.

[0098] While the basic principles of this aspect regarding the components as used are as above, in this aspect of the present invention, the detection of said at least one target RNA in said cell, tissue and/or sample relies on the detection of a cleaving of said at least one target nucleic acid in said sample by said nuclease enzyme, and detecting said cleaving of said at least one target nucleic acid thus detects said at least one target RNA in said cell, tissue and/or sample.

[0099] CasΩ can recognize RNA targets and degrade ssDNA and dsDNA. This allows the nuclease to directly sense RNAs without a reverse-transcription step, and it degrades inexpensive and stable ssDNA and dsDNA. Cas13, the leading technology, collaterally cleaves RNA. The associated RNA reporters are more expensive to synthesize and less stable than ssDNA or dsDNA, offering an immediate advantage for CasΩ. The ability to use dsDNA reporters further allows ways to boost the readout of cleavage activity, such as by creating dsDNA origami complexed with multiple fluorophores.

[0100] Examples for preferred in vitro diagnostic formats for methods of the present invention are microarrays, in particular with double-stranded DNA to monitor many DNAs at once, and lateral flow assays. Lateral flow assays are known to the person of skill, and operate on the same principles as enzyme-linked immunosorbent assays (ELISA). In essence, these tests run the liquid sample along the surface of a pad with reactive molecules that show a visual positive or negative result.

[0101] Preferred is therefore a method according to the present invention, wherein detecting said cleaving, cutting and/or nicking of the at least one reporter nucleic acid comprises detecting a change in the signal of a suitable label, such as a dye, a fluorophore, or electrical conductivity, and/or detecting the said cleaved at least one reporter nucleic acid fragment itself.

[0102] Another important aspect of the present invention is a method for modulating expression of at least one target RNA in a cell, tissue, cellular nucleus, and/or sample, wherein said at least one target RNA is selected from an mRNA, non-coding RNA and a viral RNA molecule, said method comprising: a) contacting said cell, tissue, cellular nucleus, and/or sample with at least one complex between at least one CasΩ nuclease enzyme and at least one preselected guide RNA, wherein said at least one preselected guide RNA comprises a sequence that is at least 90% complementary to the at least one target RNA, and c) binding the complex of b) to the at least one target RNA and thereby altering the stability, processing, localization, or translation of the at least one target RNA, whereby the binding in c) modulates the expression of at least one target RNA in the cell, tissue, cellular nucleus, and/or sample.

[0103] RNA targeting by CasΩ is used to impact translation of at least one target RNA in a cell, tissue, cellular nucleus, and/or sample, wherein said at least one target RNA is selected from an mRNA, non-coding RNA and a viral RNA molecule. This aspect of the present invention also allows multiplexable and sequence-specific gene silencing, which can be used for basic research, high-throughput screens, e.g., for anti-virals or other therapeutic substances. Targeting a target RNA of interest thus modulates gene expression in a sequence-specific manner, such as by altering mRNA stability, processing, or translation.

[0104] As mentioned above, the parts of the nucleic acid molecules as used in the methods of the present invention that hybridize are complementary to at least 80%, preferably complementary to more than 90%, more preferably to more than 95%, and most preferably are 100% complementary to each other. Thus, the nucleotide sequence of said portion/part of said guide RNA that specifically hybridizes with the target RNA can be produced and/or modified in order to be complementary to at least 80%, preferably complementary to more than 90%, more preferably to more than 95%, and most preferably are 100% complementary to the target RNA.

[0105] When applying the respective complementarity and assay conditions, the present method can be used in order to modulate the expression of at least one target RNA in a cell, tissue, cellular nucleus, and/or sample. Preferably, said at least one target RNA is selected from an RNA where a modulation of the expression will have a beneficial effect on the cell, tissue, cellular nucleus, and/or sample, such as an mRNA, non-coding RNA and a viral RNA molecule. In this method according to the present invention the cell, tissue, cellular cytoplasm, cellular nucleus, and/or sample is contacted with at least one complex between at least one CasΩ nuclease enzyme and at least one preselected guide RNA according to the present invention. Binding of the complex to the at least one target RNA will thereby alter the stability, processing, or translation of the at least one target RNA, and thus the binding of the complex modulates the expression of at least one target RNA in the cell, tissue, cellular nucleus, and/or sample. While the components and the conditions of the method are generally the same as described above, the complex as formed between the least one CasΩ nuclease enzyme and the at least one preselected guide RNA as above is bound to the target RNA based on the sequence as designed for the preselected guide RNA as mentioned above independently of the ability of CasΩ enzymes to cleave target nucleic acid, and this flexibility is used in order to bind said at least one target RNA. Thus, in this aspect, the CasΩ polypeptide can be modified to contain a nuclease domain (e.g., a RuvC or RuvC-like domain) with reduced or eliminated nuclease activity. The nuclease domain can be modified by one or more deletion mutations, insertion mutations, and/or substitution mutations using known methods, such as site-directed mutagenesis, PCR-mediated mutagenesis, and total gene synthesis, as well as other methods known in the art.

[0106] Preferably, fusion proteins are provided in this aspect, comprising a CasΩ polypeptide, or a fragment or variant thereof, and an effector domain. The CasΩ polypeptide can be directed to a target site by a guide RNA, at which site the effector domain can modify or effect the targeted nucleic acid sequence. The effector domain can be a cleavage domain, an RNA modifying domain, a translational activation domain, a translational repressor domain, a processing/splicing factor, a domain affecting RNA localization, or a domain that recruits proteins affecting any of these functions. The fusion protein can further comprise at least one additional domain chosen from a nuclear localization signal, plastid signal peptide, mitochondrial signal peptide, signal peptide capable of protein trafficking to multiple subcellular locations, a cell-penetrating domain, or a marker domain, any of which can be located at the N-terminus, C-terminus, or an internal location of the fusion protein. The CasΩ polypeptide can be located at the N-terminus, the C-terminus, or in an internal location of the fusion protein. The CasΩ polypeptide can be directly fused to the effector domain, or can be fused with a linker. In specific embodiments, the linker sequence fusing the CasΩ polypeptide with the effector domain can be at least 1, 2, 3, 4, 5, 6, 7, 8, 9, 10, 15, 20, 25, 30, 40, or 50 amino acids in length. For example, the linker can range from 1-5, 1-10, 1-20, 1-50, 2-3, 3-10, 3-20, 5-20, or 10-50 amino acids in length.

[0107] Preferred is the complex according to the present invention, wherein said nuclease comprises a nuclear localization signal (NLS), and respective signals are described herein and are known in the art. Said fusion nuclease comprising a nuclear localization signal and the complex as described herein as formed therewith are other embodiments of the present invention. Alternatively, no NLS can be included, which has the advantage of preventing collateral cleavage or degradation of DNA in eukaryotes.

[0108] Another important aspect of the present invention then relates to a method for editing the sequence of at least one target RNA in a cell, tissue, cellular nucleus, and/or sample, wherein said at least one target RNA is selected from an mRNA, non-coding RNA and a viral RNA molecule, said method comprising: a) contacting said cell, tissue, cellular nucleus, and/or sample with at least one complex between at least one modified and catalytically inactive CasΩ nuclease enzyme complexed with at least one RNA-modifying enzyme and at least one preselected guide RNA, wherein said at least one preselected guide RNA comprises a sequence that is at least 90% complementary to the at least one target RNA, and c) binding the complex of b) to the at least one target RNA, and editing of the at least one target RNA by said at least one RNA-modifying enzyme.

[0109] As mentioned above, the parts of the nucleic acid molecules as used in the methods of the present invention that hybridize are complementary to at least 80%, preferably complementary to more than 90%, more preferably to more than 95%, and most preferably are 100% complementary to each other. Thus, the nucleotide sequence of said portion/part of said guide RNA that specifically hybridizes with the target RNA and/or the PFS can be produced and/or modified in order to be complementary to at least 80%, preferably complementary to more than 90%, more preferably to more than 95%, and most preferably are 100% complementary to the target RNA.

[0110] In this aspect of the invention, the complex is used to edit the sequence of at least one target RNA in a cell, tissue, cellular nucleus, and/or sample, wherein said at least one target RNA is selected from an mRNA, non-coding RNA and a viral RNA molecule. For example, different genetic diseases can be corrected by editing the RNA rather than the underlying DNA, offering a means to treat the disease without creating a permanent edit in the genome. There are a few editing approaches in the art, including modified Cas9 and Cas13 nucleases as well as oligonucleotides that recruit natural RNA-modifying enzymes (ADARs).

[0111] Preferably, fusion proteins are provided in this aspect, comprising a CasΩ polypeptide, or a fragment or variant thereof, and an effector domain. The CasΩ polypeptide can be directed to a target site by a guide RNA, at which site the effector domain can modify the targeted nucleic acid sequence. The fusion protein can further comprise at least one additional domain chosen from a nuclear localization signal, plastid signal peptide, mitochondrial signal peptide, signal peptide capable of protein trafficking to multiple subcellular locations, a cell-penetrating domain, or a marker domain, any of which can be located at the N-terminus, C-terminus, or an internal location of the fusion protein. The CasΩ polypeptide can be located at the N-terminus, the C-terminus, or in an internal location of the fusion protein. The CasΩ polypeptide can be directly fused to the effector domain, or can be fused with a linker. In specific embodiments, the linker sequence fusing the CasΩ polypeptide with the effector domain can be at least 1, 2, 3, 4, 5, 6, 7, 8, 9, 10, 15, 20, 25, 30, 40, or 50 amino acids in length. For example, the linker can range from 1-5, 1-10, 1-20, 1-50, 2-3, 3-10, 3-20, 5-20, or 10-50 amino acids in length. Preferred is a fusion of the catalytically inactivated version of CasΩ fused to an RNA-modifying enzyme (e.g., ADAR) that can direct targeted editing, resulting in an altered codon and different amino acid in the translated protein.

[0112] Binding of said at least one guide RNA-dependent CasΩ nuclease enzyme complex to said at least one target RNA can be detected by any suitable detection method as known to the person of skill, and may include chromatin immunoprecipitation (ChIP) methods using an antibody against the nuclease and revers PCR primers for the RNA sequence of interest. The antibody is used to selectively precipitate the protein—RNA complex from the other RNA-protein complexes. The PCR primers allow specific amplification and detection of the target RNA sequence. Quantitative PCR (qPCR) technique allows the amount of target nucleic acid sequence to be quantified. The ChIP assay is amenable to array-based formats (ChIP-on-chip) or direct sequencing of the reverse transcribed DNA of the target RNA captured by the immunoprecipitated protein (ChIP-seq).

[0113] In a preferred embodiment of the methods according to the present invention, said at least one target RNA comprises a nucleic acid sequence that is specific for a disease state, such as, for example, for cells selected from the group consisting of cells exhibiting a genetic disorder, cells exhibiting a proliferative disorder, such as cancer cells, immune cells that produce autoantibodies, cells infected with bacterial or viral pathogens, bacterial pathogens, protozoan pathogens, cells of microbiota, and contaminating bacteria or archaea.

[0114] In another preferred embodiment of the methods according to the present invention, said at least one target RNA is single or initially double stranded. In the context of the present invention, a target RNA is any RNA of interest to be detected using the methods according to the present invention. Usually and preferably, the target RNA is a single-stranded RNA molecule, such as an mRNA, viral RNA or non-coding RNAs. The RNA can be of natural origin or artificially produced. The single stranded target RNA can be from a human cell, an animal cell, a plant cell, an immune cell, a cancerous cell, an infected cell, or a diseased cell, and/or can be derived from a virus, a parasite, a helminth, a fungus, a protozoan, a bacterium, or a pathogenic bacterium.

[0115] In a preferred embodiment of the methods according to the present invention, said method is performed in vivo, for example in a cell, tissue or in a bacterium, fungus, plant or animal, or in vitro, in a sample. The sample can be a solid or liquid sample, and can be selected from a sample comprising cells, and an acellular in vitro sample. The cells are preferably plant cells or animal cells, such as mammalian cells, preferably human cells. The sample can be a biological sample, preferably obtained from a tissue sample, saliva, blood, plasma, sera, stool, urine, sputum, mucous, lymph, synovial fluid, cerebrospinal fluid, ascites, pleural effusion, seroma, pus, or swab of skin or a mucosal membrane surface. In one aspect, the cells, tissues and/or samples can be crude samples and/or wherein the one or more nucleic acid molecules are not purified or amplified from the sample prior to application of the methods. In another aspect, the cells, tissues and/or samples can be purified or partially purified (enriched) samples and/or the one or more nucleic acid molecules are purified or amplified from the sample prior to application of the methods. In another aspect, the cells can be part of an environmental sample such as air, a natural body of water (e.g., river, lake, ocean), wastewater, or soil.

[0116] The methods according to the present invention can be partially or fully automated, e.g., performed fully or in part by robots. The methods according to the present invention can involve the use of computers and respective databases for performing and/or analysis of the results as obtained.

[0117] In one aspect, several or even a multitude of target nucleic acids may be used in one or more samples, tissues and/or cells, and preferably in a multitude of samples, tissues and/or cells. In one aspect, several or even a multitude of target RNAs are used in one or more samples, tissues and/or cells, and preferably in several or even a multitude of samples, tissues and/or cells.

[0118] In a preferred embodiment of the methods according to the present invention, more than one guide RNAs are selected, designed, generated (produced, see above) and used, each specifically hybridizing with a different portion of said target RNA in one or more samples, tissues and/or cells, and preferably in several or even a multitude of samples, tissues and/or cells.

[0119] In the context of altering gene expression, RNA editing, or programmable killing according to the present invention, the present system could, for example, target anywhere from 2 to 7 genetic loci by cloning multiple guide RNAs into a single plasmid. These multiplex guide RNA vectors can conceivably be suitably combined with the aforementioned CasΩ nucleases in order be used in the aspects of the invention.

[0120] In another aspect of the methods according to the present invention, said methods, at least in part, comprise a quantitative analysis. Preferred is therefore a step comprising detecting the amount of the nucleic acid as cleaved in said sample, tissue and/or cell. Preferably the amount per sample, tissue and/or cell is determined, when compared to a control. Quantification assays are known to the person of skill, and may include absorbance (e.g., UV, spectrophotometry) and/or fluorescence assays, and real-time PCR. The assays can quantify the amount(s) and/or ratios of the nucleic acid(s) as quantified as a single value (e.g., as the result or at the “end” of the assay as used) or can monitor changes over time in the nucleic acids, i.e., preferably further comprising detecting a change in the amount of said cleaved nucleic acid(s), in particular when compared to a control.

[0121] In yet another aspect of the methods according to the present invention, multiple labels and/or markers are used. Markers can be used both for the nucleic acid molecules that form part of the assays, as well as the protein components (e.g., nuclease and/or fusions). Labels and markers can be included into the components of the assays (in particular the nucleic acids and/or the proteins), as well as constitute moieties that are attached, either covalently or non-covalently.

[0122] Another aspect of the present invention then relates to a method for detecting a medical condition in a cell, tissue or organism, such as a mammal, preferably a human, wherein said condition is related to the presence of, expression of and/or mutation(s) in at least one target RNA. The method comprises performing the method according to the invention as above, and detecting said medical condition based on the nucleic acids cleavage as caused by the presence of, expression of and/or mutation(s) in said at least one target RNA as detected.

[0123] The medical conditions that can be detected using the present invention are those that are related to the at least one target RNA molecule. As explained above, the target RNA can either itself constitute the origin of the condition or disease, for example in case of infections, e.g., viral, such as, for example, coronavirus infection, bacterial and/or fungal infections of the cells, tissues and/or samples as tested. Other conditions may relate more indirectly to the at least one target RNA molecule, for example in case of an RNA that is aberrantly transcribed (present or found), expressed, processed (e.g., splicing) and/or mutated. The target RNA molecule can be present in an increased or decreased amount when compared to a healthy control (e.g., a control based on a group of healthy or diseased samples).

[0124] Examples for preferred in vitro diagnostic formats for methods of the present invention are microarrays, and lateral flow assays. Lateral flow assays are known to the person of skill, and operate on the same principles as enzyme-linked immunosorbent assays (ELISA). In essence, these tests run the liquid sample along the surface of a pad with reactive molecules that show a visual positive or negative result.

[0125] As mentioned above, in a preferred embodiment of the methods according to the present invention, the at least one target RNA can be added to said cell, tissue and/or sample prior to step a), and/or wherein said method further comprises at least one step selected from in vitro transcription of DNA into RNA, reverse transcription of RNA into DNA, and—optimally—subsequent in vitro transcription of said DNA into RNA. This can be done in order to provide suitable or desired signal amplification. Usually, the target RNA in said cell, tissue or sample is present in a range of from about 500 fM to about 1 uM, e.g., from about 500 fM to about 1 nM, preferably is present in a range of from about 1 pM to about 1 nM. Optimally, the method can detect a single molecule per cell, tissue and/or sample.

[0126] Another important aspect of the present invention then relates to the use of the present invention in medicine.

[0127] One aspect of the present invention is a method for specifically inactivating an undesired cell or virus, comprising contacting said cell or virus with a complex according to the present invention as described herein, wherein the guide RNA, particularly the sequence thereof, is specifically selected/designed for said undesired cell or virus to be inactivated or non-edited cell as described herein.

[0128] Another aspect of the present invention is the complex according to the present invention as described herein, for use in the prevention and/or treatment of diseases, such as for example, for use in the prevention and/or treatment of infections and/or genetic disorder, such as proliferative disorders, such as cancer, fungal, protozoan, bacterial and/or viral infections.

[0129] Embodiments are clearing an infecting virus from a cell and (specific) killing of an undesired cell because it contains a cancer mutation.

[0130] Yet another aspect of the present invention is a method for preventing and/or treating a disease, such as for example, an infection and/or genetic disorder, such as a proliferative disorder, such as cancer, fungal, protozoan, bacterial and/or viral infections, an autoimmune disease, comprising administering to a subject in need of such treatment an effective amount of the complex according to the present invention.

[0131] The present invention can be used for sequence-specific cell killing. There are numerous applications where killing a cell in a sequence-specific manner is desirable. Specific examples are selective killing of cancer cells, immune cells that produce autoantibodies, cells infected with bacterial or viral pathogens, bacterial pathogens, or contaminating bacteria or archaea in an industrial culture. Target RNA recognition in the nucleus (e.g., using CasΩ fused to a nuclear localization signal in eukaryotes) leads to extensive dsDNA cleavage, and killing of the cell. If the target RNA is absent in the cell or sample, or contains mutations, then the cell is spared. This effect particularly applies to cancer cell, bacteria and archaea.

[0132] There is no available approach for programmable and sequence-specific killing in eukaryotes; instead, the field has focused on improvements that boost the editing efficiency.

[0133] CasΩ thus offers the first means to achieve sequence-specific killing/inactivation of prokaryotic and eukaryotic cells. In eukaryotes this could offer a unique means to kill cancer cells based on their unique mutations, as well as specific immune cells based on their differentiated genetic material encoding specific antibodies. This approach leads to new therapies, e.g., for treating specific autoimmune disorders, and can become a standard approach for enriching edited cells in a population.

[0134] The inventive approach is also used to fight infectious diseases. Delivery of CasΩ to eukaryotic cells infected with virus or bacteria aids the immune system by recognizing the viral or bacterial RNA and then destroying the virus or bacterial DNA. These treatments result in death of the infected host cell, which stops disease spread and activates the immune system further. Because CasΩ is selective, delivery to non-infected cells not containing the complementary viral or bacterial RNA causes an inert response.

[0135] The inventive approach is also used to treat/regulate/engineer microbial populations important for industry and medicine, for example, if a certain strain of bacteria within a mammalian, e.g., human, microflora is correlated with obesity, it is targeted for cell death without killing other in situ bacterial populations. Such treatments will also be able to provide avenues to combat antibiotic resistant strains of bacteria.

[0136] In this aspect, the complex or a nucleic acid encoding all or parts of it is used as the actual active ingredient in the prevention and/or treatment. Delivery of the complex to a patient a cell or a sample can be done in any suitable way, for example as a pharmaceutical composition comprising the isolated components of at least one complex (polypeptide and/or nucleic acid) according to the present invention together with suitable stabilizers or carriers. Another embodiment is the provision of the complex encoded on at least one nucleic acid vector to the patient, cell, tissue, sample or nucleus. These pharmaceutical compositions and uses thereof constitute preferred embodiments of the present invention. This aspect also includes the step of monitoring a treatment.

[0137] Another aspect is the use of the complex and the method of the present invention for the counterselection of non-edited cells to improve overall gene editing outcomes, as described above. This approach can select for any desired edits as introduced that disrupt the target RNA sequence, the rPAM, its accessibility, and/or its transcription.

[0138] Yet another aspect of the present invention then relates to a method for treating a disease or medical condition in a cell, tissue or organism, such as a mammal, preferably a human, wherein said condition is related to the presence of, expression of and/or mutation(s) in at least one target RNA.

[0139] This aspect combines the diagnostic approach of the invention with a separate “regular” medical treatment, and also includes the use for monitoring the treatment. The method comprises providing a suitable treatment to said cell, tissue or organism, in particular a specific medical treatment, performing the method according to the invention as above, and modifying said treatment of said disease or medical condition based on the presence of, expression of and/or mutation(s) in said at least one target RNA as detected. The medical conditions that can be detected using the present invention are those that are related to the at least one target RNA molecule. As explained above, the target RNA can either itself constitute the origin of the condition or disease, for example in case of infections, e.g., viral, such as, for example, coronavirus infection, bacterial and/or fungal infections of the cells, tissues and/or samples as tested. Other conditions may relate more indirectly to the at least one target RNA molecule, for example in case of an RNA that is aberrantly transcribed (present or found), expressed, processed and/or mutated. The target RNA molecule can be present in an increased or decreased amount when compared to a healthy control (e.g., a control based on a group of healthy or diseased samples).

[0140] In a preferred embodiment of the methods for treatment according to the present invention, said at least one target RNA is single or initially double stranded. The single stranded target RNA can be/relates to from a human cell, an animal cell, a plant cell, an immune cell, a cancerous cell, an infected cell, or a diseased cell, and/or can be derived from a virus (see above), a parasite, a helminth, a fungus, a protozoan, a bacterium, or a pathogenic bacterium (see above). In a preferred embodiment of the methods according to the present invention, the at least one target RNA is derived from/related to a gene the transcription and/or expression thereof is modified in response to external factors, such as, for example, metabolic factors or signals, hormones, pathogens, toxins, drugs, ageing and/or biotic or abiotic stress. Consequently, the at least one target RNA is preferably related to a condition selected from a viral infection, such as, for example, coronavirus infection, infection with a pathogen, a metabolic disease, cancer, neurodegenerative diseases, ageing, a drug, and biotic or abiotic stress). Usually, the presence of or the increased or decreased amount of the target RNA is indicative for the presence of said disease or condition. Another aspect of the method relates to a monitoring of the amount or presence of said target RNA during a treatment of said individual, patient or organism, in particular the individual, patient or organism from which the cell, tissue and/or sample has been obtained. The attending physician will then adjust the treatment accordingly, i.e., provide more with antiviral chemotherapeutics and/or biologics, if required. This treatment schedule can be repeated, if required.

[0141] Finally, again similarly as above, designed guide RNAs (e.g., specific for a bacterial or fungal target nucleic acid) could be used with a sample containing an infecting bacterial or fungal pathogen (e.g., Clostridioides difficile in a stool sample, Pseudomonas aeruginosa in a sputum sample) to identify specific markers of antibiotic resistance to determine the best regime of antibiotics to administer to a patient.

[0142] In another preferred aspect thereof, the object of the present invention is solved by providing a detection system for a target RNA comprising a) at least one preselected guide RNA designed to bind to at least one portion of said target RNA, wherein said at least one preselected guide RNA comprises a sequence that is at least 90% complementary to the target RNA, and b) at least one CasΩ nuclease enzyme. Preferred is a detection system for the parallel detection of several target RNAs in parallel, comprising a set of several guide RNAs for said several target RNAs. Another detection system comprises several guide RNAs that hybridize at several positions on one target RNA.

[0143] The parts of the nucleic acid molecules as used in the methods of the present invention that hybridize are complementary to at least 80%, preferably complementary to more than 90%, more preferably to more than 95%, and most preferably are 100% complementary to each other. Thus, the nucleotide sequence of said portion/part of said guide RNA that specifically hybridizes with the target RNA can be produced and/or modified in order to be complementary to at least 80%, preferably complementary to more than 90%, more preferably to more than 95%, and most preferably are 100% complementary to the target RNA.

[0144] This aspect of the present invention provides the components, e.g., preselected guide RNA nucleic acid molecule and at least one CasΩ nuclease enzyme as above for performing the methods according to the invention as a detection system, for example as a part of a diagnostic kit. The system may also be used in a therapeutic kit, or a pharmaceutical composition comprising the isolated components of at least one complex (polypeptide and/or nucleic acid) according to the present invention together with suitable stabiliziers or carriers. Another embodiment is the provision of the complex encoded on at least one nucleic acid vector to the patient, cell, tissue, sample or nucleus.

[0145] Preferably, said system is provided in one or more containers, and comprises suitable enzymes, buffers, and excipients, as well as instructions for use. The components can be—at least in part—immobilized on a substrate, wherein said substrate can be exposed to said cell, tissue and/or sample. The detection system can be applied to multiple discrete locations on said substrate, such as a flexible materials substrate, for example a chip. The flexible materials substrate can be a paper substrate, a fabric substrate, or a flexible polymer-based substrate.

[0146] Yet another aspect of the present invention the relates to the use of the complex according to the present invention as described herein for cleaving a nucleic acid molecule selected from dsDNA, ssDNA, and RNA, for detecting at least one target RNA in a cell, tissue, cellular nucleus, and/or sample, for modulating expression of at least one target RNA in a cell, tissue, cellular nucleus, and/or sample, for editing the sequence of at least one target RNA in a cell, tissue, cellular nucleus, and/or sample, for specifically inactivating an undesired cell or virus, or for decontaminating a preparation from an undesired contaminant, in accordance with the methods as disclosed herein. Preferably, the object of the present invention is solved by providing the use of the CasΩ guide RNA nucleic acid complex for performing a method according to any one of the aspects as above, in particular for detecting a target RNA, a viral target RNA, a target RNA transcribed from a disease marker, the treatment of diseases, and/or for generating an expression profile for one or more target RNAs, as mentioned above.

[0147] The embodiments described herein can be used for wide-ranging applications, such as diagnosing medical conditions to inform the course of treatment, identifying SNPs associated with health outcomes or disease, such as in acute sepsis, determining the identity of pathogen, virulence factors, resistance markers, SNPs, viral detection, i.e., the identity, and/or viral variants (see, for example, SARS CoV-2 as disclosed herein), cancer diagnostics, in cancer samples, such as biopsies, determining mutations, and/or SNPs, identifying microbial contaminants in potable water, identifying viral or microbial contaminants in fermentations or cell cultures, identifying plant or insect variants, or identifying key microbial members in mixed communities (e.g., in the gut, soil, water), such as analysis of microbiomes and/or microbial sentinels (i.e., commensal bacteria that serve as reporters for non-invasive measurements), in particular the identity, relative abundance, resistance markers, metabolic genes, phylum/genus/species/strain-specific genes, and the like, and the tracking of viral or bacterial spread in vivo, such as in whole organisms, or based on samples, for example taken from the environment (e.g., spread of viruses or resistant bacteria detected in waste water samples, etc.).

[0148] In the context of the present invention, unless explicitly mentioned otherwise, the term “about” shall mean a value as given +/−10%.

[0149] Cas12 nucleases (within Type V CRISPR-Cas systems) are known to recognize dsDNA, thereby eliciting cleavage of the bound dsDNA and subsequent degradation of ssDNA.

[0150] Cas12a is the representative example. Given its similarity to the established Cas nuclease Cas12a, CasΩ was presumed to target DNA. The only exception within Cas12 nucleases is Cas12g, which recognizes RNA and degrades RNA and ssDNA. CasΩ as used here was originally classified as Cas12a based on its similarity, although it has distinct domains and sometimes appears with Cas12a.

[0151] As stated herein, the present invention particularly relates to the following items.

[0152] Item 1. A complex comprising a CasΩ nuclease and at least one preselected guide RNA designed for binding to at least one target RNA.

[0153] Item 2. The complex according to claim 1, further bound to a target RNA molecule having a sequence that is at least 90% complementary to said guide RNA, and wherein said target RNA is preferably flanked by at least one rPAM.

[0154] Item 3. The complex according to Item 1 or 2, wherein said guide RNA comprises a sequence selected to be specific for a bacterium, a sequence selected to be specific for a virus, a sequence selected to be specific for a fungus, a sequence selected to be specific for a protozoan, a sequence selected to be specific for a genetic disorder, and a sequence selected to be specific for a proliferative disorder.

[0155] Item 4. The complex according to any one of Items 1 to 3, wherein said nuclease comprises a nuclear localization signal.

[0156] Item 5. Method for cleaving a nucleic acid molecule selected from dsDNA, ssDNA, and RNA, comprising the steps of a) providing at least one CasΩ nuclease enzyme, b) providing at least one preselected guide RNA, c) forming a complex between the least one CasΩ nuclease enzyme and the at least one preselected guide RNA, d) binding of the complex of c) to a target RNA based on the at least one preselected guide RNA, and e) cleaving said nucleic acid molecule selected from dsDNA, ssDNA, and RNA by the at least one CasΩ nuclease enzyme.

[0157] Item 6. A method for detecting at least one target RNA in a cell, tissue, cellular nucleus, and/or sample, said method comprising: a) providing at least one ssDNA, dsDNA or RNA reporter nucleic acid in said cell, tissue, cellular nucleus, and/or sample, b) contacting said cell, tissue, cellular nucleus, and/or sample with at least one complex between at least one CasΩ nuclease enzyme and at least one preselected guide RNA, wherein said at least one preselected guide RNA comprises a sequence that is at least 90% complementary to the target RNA, and c) detecting a cleaving, cutting and/or nicking of said at least one ssDNA, dsDNA or RNA reporter nucleic acid, wherein detecting said cleaving the at least one reporter nucleic acid detects said at least one target RNA in said cell, tissue, cellular nucleus and/or sample.

[0158] Item 7. The method according to Item 6, wherein detecting said cleaving, cutting and/or nicking of the at least one reporter nucleic acid comprises detecting a change in the signal of a suitable label, such as a dye, a fluorophore, or electrical conductivity, and/or detecting the said cleaved at least one reporter nucleic acid fragment itself.

[0159] Item 8. The method according to Item 6 or 7 wherein the at least one target RNA is a mutated target RNA comprising at least one mutation compared to a control target RNA.

[0160] Item 9. A method for modulating expression of at least one target RNA in a cell, tissue, cellular nucleus, and/or sample, wherein said at least one target RNA is selected from an mRNA, non-coding RNA and a viral RNA molecule, said method comprising: a) contacting said cell, tissue, cellular nucleus, and/or sample with at least one complex between at least one CasΩ nuclease enzyme and at least one preselected guide RNA, wherein said at least one preselected guide RNA comprises a sequence that is at least 90% complementary to the at least one target RNA, and c) binding the complex of b) to the at least one target RNA and thereby altering the stability, processing, localization, or translation of the at least one target RNA, whereby the binding in c) modulates the expression of at least one target RNA in the cell, tissue, cellular nucleus, and/or sample.

[0161] Item 10. A method for editing the sequence of at least one target RNA in a cell, tissue, cellular nucleus, and/or sample, wherein said at least one target RNA is selected from an mRNA, non-coding RNA and a viral RNA molecule, said method comprising: a) contacting said cell, tissue, cellular nucleus, and/or sample with at least one complex between at least one modified and catalytically inactive CasΩ nuclease enzyme complexed with at least one RNA-modifying enzyme and at least one preselected guide RNA, wherein said at least one preselected guide RNA comprises a sequence that is at least 90% complementary to the at least one target RNA, and c) binding the complex of b) to the at least one target RNA, and editing of the at least one target RNA by said at least one RNA-modifying enzyme.

[0162] Item 11. The method according to any one of Items 5 to 10, wherein the at least one target RNA comprises a nucleic acid sequence that is specific for a disease state, such as, for example, for cells selected from the group consisting of cells exhibiting a genetic disorder, cells exhibiting a proliferative disorder, such as cancer cells, immune cells that produce autoantibodies, cells infected with bacterial or viral pathogens, bacterial pathogens, protozoan pathogens, cells of microbiota, and contaminating bacteria or archaea.

[0163] Item 12. The complex according to Item 3 or 4 for use in the prevention and/or treatment of diseases, such as for example, for use in the prevention and/or treatment of infections and/or genetic disorder, such as proliferative disorders, such as cancer, fungal, protozoan, bacterial and/or viral infections.

[0164] Item 13. Method for specifically inactivating an undesired cell or virus, comprising contacting said cell or virus with a complex according to any one of Items 1 to 4, wherein said guide RNA is specifically selected for said undesired cell or virus to be inactivated.

[0165] Item 14. A method for preventing and/or treating a disease, such as for example, an infection and/or genetic disorder, such as a proliferative disorder, such as cancer, fungal, protozoan, bacterial and/or viral infections, an autoimmune disease, comprising administering to a subject in need of such treatment an effective amount of the complex according to Items 3 or 4.

[0166] Item 15. Use of the complex according to any one of Items 1 to 4 for cleaving a nucleic acid molecule selected from dsDNA, ssDNA, and RNA, for detecting at least one target RNA in a cell, tissue, cellular nucleus, and/or sample, for modulating expression of at least one target RNA in a cell, tissue, cellular nucleus, and/or sample, for editing the sequence of at least one target RNA in a cell, tissue, cellular nucleus, and/or sample, for specifically inactivating an undesired cell or virus, for decontaminating a preparation from an undesired contaminant, or for removing cells that remain unedited by a method according to Item 10.

[0167] Item 16. The complex or the method according to any one of Items 1 to 13, wherein said guide RNA molecule comprises a sequence that is to at least 80%, preferably to more than 90%, more preferably to more than 95%, and most preferably 100% complementary to a target RNA.

[0168] Item 17. Method for specifically removing, inactivating and/or killing undesired cells that have not been edited by a method according to Item 10, comprising contacting the cells with a complex according to any one of Items 1 to 4, wherein said guide RNA is specifically selected for said unedited cell to be removed, inactivated and/or killed.

### EXAMPLES

### Cas12 Forms Three Distinct Clades Among Class 2 Type V CRISPR-Cas Nucleases

[0169] Maximum likelihood phylogeny of Class 2 Type V CRISPR-Cas protein sequences was generated, including three distinct monophyletic CasΩ clades, as typified by the representative nucleases SmCasΩ, SuCasΩ and ca40CasΩ. CasΩ nucleases do not share the last common ancestor with Cas12a. Transfer bootstrap (TBE) support values are shown at the nodes. Amino acid sequences of proteins were aligned using ClustalΩ Phylogenetic reconstruction was generated using RAxML-NG using the following parameters: --model JTT+G --bs-metric fbp,tbe --tree pars{60},rand{60} --seed 12345 --bs-trees autoMRE. TnpB amino acid sequenes served as an outgroup. See also FIG. 1.

### Analysis of Amino Acid Conservation Within CRISPR-SuCasΩ Nucleases

[0170] Nuclease orthologues from the SuCasΩ phylogenetic clade contain RuvC-I, RuvC-II, and RuvC-III catalytic motifs common to Type V CRISPR-Cas nucleases. SuCasΩ orthologues contain multiple conserved amino acid motifs absent from non-CasΩ nucleases, such as Cas12a. On average SuCasΩ orthologues share ≤10% sequence identity with Cas12a nucleases. Amino acids probabilities in each position within the alignment of 16 SuCasΩ orthologues are shown. Amino acid sequences of proteins were aligned using ClustalΩ. The amino acid logos and the corresponding probabilities were generated using WebLogo 3.

### Amino Acid Conservation Between the RuvC-I and RuvC-III Motifs in CRISPR-SuCasΩ Nucleases

[0171] Nuclease orthologues from the SuCasΩ phylogenetic clade exhibit unique amino acid composition, e.g., between the RuvC-I and RuvC-II catalytic motifs, comprising an insertion of multiple conserved amino acid motifs compared to non-CasΩ nucleases, such as Cas12a. Furthermore, SuCasΩ orthologues exhibit unique amino acid composition between the RuvC-II and RuvC-III catalytic motifs, comprising a deletion of amino acids compared to non-CasΩ nucleases, such as Cas12a. Relative entropy is shown in bits. High entropy indicates high certainty that a given amino acid is present in an orthologous motif based on the alignment of 16 SuCasΩ orthologues. Amino acid sequences of proteins were aligned using ClustalΩ. The amino acid logos and the corresponding entropy values were generated using WebLogo 3. See also FIG. 2.

### Amino Acid Conservation Within CRISPR-SmCasΩ Nucleases

[0172] Nuclease orthologues from the SmCasΩ phylogenetic clade contain RuvC-I, RuvC-II, and RuvC-III catalytic motifs common to Type V CRISPR-Cas nucleases. SmCasΩ orthologues contain multiple conserved amino acid motifs absent from non-CasΩ nucleases such as Cas12a. On average SmCasΩ orthologues share <10% sequence identity with Cas12a nucleases. Amino acids probabilities in each position within the alignment of 36 SmCasΩ orthologues are shown. Amino acid sequences of proteins were aligned using ClustalΩ. The amino acid logos and the corresponding probabilities were generated using WebLogo 3.

### Amino Acid Conservation Between the RuvC-I and RuvC-III Motifs in CRISPR-SmCasΩ Nucleases

[0173] Nuclease orthologues from the SmCasΩ phylogenetic clade exhibit unique amino acid composition, e.g., between the RuvC-I and RuvC-II catalytic motifs, comprising an insertion of multiple conserved amino acid motifs compared to non-CasΩ nucleases, such as Cas12a. Furthermore, SmCasΩ orthologues exhibit unique amino acid composition between the RuvC-II and RuvC-III catalytic motifs, comprising a deletion of amino acids compared to non-CasΩ nucleases, such as Cas12a. Relative entropy is shown in bits. High entropy indicates high certainty that a given amino acid is present in an orthologous motif based on the alignment of 36 SmCasΩ orthologues. Amino acid sequences were aligned using ClustalΩ. The amino acid logos and the corresponding entropy values were generated using WebLogo 3. See also FIG. 3.

### Amino Acid Conservation Within CRISPR-ca40CasΩ Nucleases

[0174] Nuclease orthologues from the ca40CasΩ phylogenetic clade contain RuvC-I, RuvC-II, and RuvC-III catalytic motifs common to Type V CRISPR-Cas nucleases. ca40CasΩ orthologues contain multiple conserved amino acid motifs absent from non-CasΩ nucleases such as Cas12a. On average ca40CasΩ orthologues share ≤10% sequence identity with Cas12a nucleases. Amino acids probabilities in each position within the alignment of 15 ca40CasΩ orthologues are shown. Amino acid sequences of proteins were aligned using ClustalΩ. The amino acid logos and the corresponding probabilities were generated using WebLogo 3.

### Amino Acid Conservation Between the RuvC-I and RuvC-III Motifs in CRISPR-ca40CasΩ Nucleases

[0175] Nuclease orthologues from the ca40CasΩ phylogenetic clade exhibit unique amino acid composition, e.g., between the RuvC-I and RuvC-II catalytic motifs, comprising an insertion of multiple conserved amino acid motifs compared to non-CasΩ nucleases, such as Cas12a. Furthermore, ca40CasΩ orthologues exhibit unique amino acid composition between the RuvC-II and RuvC-III catalytic motifs, comprising a deletion of amino acids compared to non-CasΩ nucleases, such as Cas12a. Relative entropy is shown in bits. High entropy indicates high certainty that a given amino acid is present in an orthologous motif based on the alignment of 15 ca40CasΩ orthologues. Amino acid sequences of proteins were aligned using ClustalΩ. The amino acid logos and the corresponding entropy values were generated using WebLogo 3. See also FIG. 4.

### CasΩ Recognizes RNA and Cleaves RNA, ssDNA, and dsDNA In Vitro

[0176] As shown in FIG. 5, purified SuCasΩ and a designed guide RNA (crRNA) were combined with an unlabeled target or non-target RNA as well as labeled non-target single stranded DNA (ssDNA), double-stranded DNA (dsDNA), and single stranded RNA (ssRNA). (A) Only in the presence of the RNA target did SuCasΩ degrade the non-target ssDNA, dsDNA, and ssRNA. (B) In the presence of non-target RNA, SuCasΩ did not degrade the ssDNA, dsDNA, and ssRNA. This activity (in particular, RNA target recognition and dsDNA collateral degradation) represents an entirely unique activity for CRISPR nucleases.

[0177] For A) in FIG. 5, approximately 250 nM CasΩ:crRNA complex was mixed with 100 nM of either unlabeled targeted ssRNA or non-targeted ssRNA and 100 nM of labeled collateral substrate (non-target ssDNA, dsDNA, and ssRNA, *denotes 5′ FAM label.) Reactions were run in NEB 3.1 (50 mM Tris-HCl (pH 7.9), 100 mM NaCl, 10 mM MgCl2, 100 μg/mL BSA). Reactions were diluted to 10 μL with H₂O and incubated at 37° C. for 1 hour. Reactions were phenol:chloroform extracted before separation by 12% UREA-PAGE. The bands on the gel are of the labeled FAM substrates. For B) in FIG. 5, approximately 250 nM WT CasΩ:crRNA complex was mixed with 100 nM of either unlabeled target ssRNA or non-target ssRNA and 100 nM of 5′ FAM labeled non-target dsDNA. Reactions were run in NEB 3.1 (50 mM Tris-HCl (pH 7.9), 100 mM NaCl, 10 mM MgCl₂, 100 μg/mL BSA). Reactions were diluted to 10 μL with H₂O and incubated at 37° C. for 1 hour. Time points were taken at 1, 5, 10, 30, 60 min and were quenched by phenol:chloroform extraction before separation by 12% UREA-PAGE. The bands on the gel are of the labeled FAM substrates.

### RNA-Triggered DNA Degradation by CasΩ In Vitro Depends on the RuvC Domain

[0178] As shown in FIG. 6, SuCasΩ was mutated in two sites within the RuvC motifs associated with DNA cleavage. The cleavage assays were conducted as described in the previous figure. In this case, mutating the RuvC domain eliminated the RNA-triggered degradation of dsDNA. Approximately 250 nM E1064A/D1213A CasΩ:crRNA complex was mixed with 100 nM of either unlabeled target ssRNA or non-target ssRNA and 100 nM of 5′ FAM labeled non-target dsDNA. Reactions were run in NEB 3.1 (50 mM Tris-HCl (pH 7.9), 100 mM NaCl, 10 mM MgCl₂, 100 μg/mL BSA). Reactions were diluted to 10 μL with H₂O and incubated at 37° C. for 1 hour. Time points were taken at 1, 5, 10, 30, 60 min and were quenched by phenol:chloroform extraction before separation by 12% UREA-PAGE. The bands on the gel in FIG. 6 are of the labeled FAM substrates.

### Cas12 Degrades ssDNA Following RNA Target Recognition In Vitro

[0179] RNA-triggered SuCasΩ activity was tested in vitro with non-target ssDNA. The ssDNA was labeled with a fluorophore for fluorescence detection. The results show that ssDNA is also degraded by triggered SuCasΩ. Target ssDNA and dsDNA did not trigger SuCasΩ activity. For the results as shown in FIG. 7, approximately 250 nM CasΩ:crRNA complex was mixed with 100 nM of labeled substrate (Target: ssRNA, ssDNA, or dsDNA). Reactions were run in NEB 3.1 (50 mM Tris-HCl (pH 7.9), 100 mM NaCl, 10 mM MgCl₂, 100 μg/mL BSA). Reactions were diluted to 10 μL with H₂O and incubated at 37° C. for 1 hour. Reactions were phenol: chloroform extracted and denatured in formaldehyde before separation by 12% UREA-PAGE in 0.5×MOPS buffer (10 mM MOPS, (pH 7.0), 2.5 mM Sodium Acetate, 0.5 mM EDTA). The bands on the gel are of the labeled FAM substrates.

### CasΩ Degrades Plasmid DNA Following RNA Target Recognition In Vitro

[0180] RNA-triggered SuCasΩ activity was tested in vitro with plasmid DNA. The plasmid was detected by running the nucleic acid products on an agarose gel and staining with ethidium bromide. The results show that plasmid DNA is also degraded by triggered SuCasΩ. For the results as shown in FIG. 8, approximately 100 nM CasΩ:crRNA complex was mixed with 100 nM of either unlabeled target ssRNA or non-target ssRNA and 40 nM of non-target plasmid (non-target pet27b TTTC). Reactions were run in NEB 3.1 (50 mM Tris-HCl (pH 7.9), 100 mM NaCl, 10 mM MgCl₂, 100 μg/mL BSA). Reactions were diluted to 10 μL with H₂O and incubated at 37° C. for 1 hour. Reactions were phenol:chloroform extracted before separation by electrophoresis in 1% agarose. Nucleic acids were visualized through staining with ethidium bromide.

### CasΩ Impairs Growth Following Target Recognition in E. coli

[0181] The activity of SuCasΩ was assessed without selecting for the target plasmid or any plasmids. As shown in FIG. 9; (A-B) Transformation-fold reduction when transforming the SuCasΩ plasmid into cells already harboring the crRNA plasmid and a target/non-target plasmid. Different rPAMs and target mismatches were tested with or without selection for the target plasmid. SuCasΩ but not Cas12a reduced plasmid transformation even when not selecting for the target plasmid. (C) Assessing growth of E. coli cells expressing different nucleases under different selection conditions. SuCasΩ and LsCas13a but not LbCas12a reduced growth even in the absence of a selecting antibiotic. LsCas13a is known to collaterally degrade cellular RNAs upon target recognition, yielding a similar effect on growth. The impact of targeting by SuCasΩ compared to other nucleases was further assessed in E. coli. (D) Measuring the SOS response using the recA promoter driving GFP expression. GFP fluorescence was measured after 4-h induction of the nuclease and guide RNA, all in the absence of a selecting antibiotic. Only SuCasΩ significantly elicited the SOS response compared to a non-target control. (E) Assessing cell morphology and DNA content. Cells were stained with the DNA binding dye DAPI and assessed by flow cytometry analysis. Only cells with SuCasΩ targeting led to a bifurcation in the population, with some cells becoming filamentous while others becoming small and containing less DNA. Both reflect extensive DNA damage.

### CasΩ Nucleases Exhibit RNA-Triggered Collateral Activity in TXTL

[0182] RNA-triggered SuCasΩ and SmCasΩ activity was tested in cell-free transcription-translation (TXTL) reactions with a non-target plasmid DNA encoding a fluorescent GFP reporter. SuCasΩ and SmCasΩ nucleases and crRNA were expressed from plasmids. Target RNA was either expressed or not expressed from separate plasmids in the reactions. The results show that RNA recognition by CasΩ nucleases leads to a reduction in GFP fluorescence attributed to the collateral degradation of the non-target GFP-expressing reporter plasmid. See also FIG. 10.

[0183] Example diagnostic use: CasΩ and a guide RNA designed to recognize SARS-CoV-2 are combined with a dsDNA probe fused to a fluorophore and quencher as well as RNA extracted from a patient sample. If the RNA sample contains the SARS-CoV-2 RNA, then the CasΩ:guide RNA complex will be triggered to degrade the dsDNA probe.

[0184] Release of the fluorophore from the quencher will give a fluorescent signal. This same approach could be used to distinguish SARS-CoV-2 variants.

[0185] Sequence-specific killing example: A chimeric antigen receptor is inserted into a patient T cell in the native receptor locus as part of immunotherapy, although editing only occurs in 1% of the cells. CasΩ-NLS and a guide RNA designed to recognize the unedited (but not the edited) locus is introduced through transient transfection of a plasmid or delivery of an RNP. Recognition of the RNA from the transcribed WT locus triggers extensive dsDNA degradation, killing off the unedited cells. The result is the population now comprises almost 100% edited cells. CasΩ could also be delivered to pathogens through conjugated plasmids or bacteriophages/phagemids, allowing sequence-specific killing within a microbial population or microbiome.

The application's sequence listing, which the Patent Office published only in electronic form, follows.

SEQUENCE LISTING (67 sequences)

SEQ ID NO: 1 - protein, 1180 aa, unknown
  Metagenome-derived sequence
MSDKNQSFSQFTNLYELSKTLRFELKPSEITFEKLENNKLFKVKDVESKIFSKNENGEISEAEKKVKNYLFDINETELNNLVKKCDEKIEEIKKIKDFLEKNPDKLWQVWIDNEKIKIIDKDLKYILQEKKSWEKSFWNEAKNDKKTGNLGVQSTFRVEWKKGLFLTFDDVDAYFEKIRSTENSERKVGEFTKQVIERLDFLLKQYRIRELQLLLNTKGDTEQNEKKLFQTKKERVARIRNYLGIFLKLERICSLFNYTYEDSFCEFPLELKENLEEYNLDLKNIISEVETIFSESNLYLHKNIERKFTLNIRAINPRPESDDPKNNKKLTEDKILEKIEELEENISNAKRLKAELKGERSYKKNNGERNYEDHKKQEWDTVLKELNPSNEAGLFSQLTQLRRDLEEVHLTHFGVLLEKDGLFYLALENKRVNNGKNGDIKKMGDFELQNFFKNKNKGNAKYLSYKNITFKALRRLCLEKTSSMKTKYFLNKENESWTEFTEKGRRKREQQKNWREEKYFDDLKQYLQEILKNKAGKIGVKFTDNDFKEWENIEWDEDLKNLSNLIDKQGYKATWNNFDWDALQELEESTEIEIFQIYNKDFLIDPDFAVSDKDKEKVERMQFTKDKLEKEGKKFIPKYKNPNKKEKQNLYTTYWQNFFADKSNKEFRIKPEGKFYVRLASEDAGENGNKKLLEKETKKEFEKIRRIRFTEDKILADFNLWINPTIDKVQSKVKKKSEVKNHIDAMNKIHKTDETDFYVLGLDRGLNSLVSYGLFDSNLNIVQINGKGNFQETQNKEYDNTLDFVCGDWSLVNSKGVFVKREKIFDDNEKNKYFLKCCDILFYQLKKYLDIPFVNPETDKKLLIDEYYNQFIYDSEKGEYSLKILDYEGKQSGNSGELGEYYSFVILENDNESDRNYELRDENGNEIIIRDKDDNKVFDYVLSFYVEKAKRIFALKKQQDFNSALELTKEEVEEVKEFLFQSVEELKEGFTNFVIGEIVKLSKNIAEQKNKKLYIVFEDLVNYGKNKGEELEKSFTEMRHEENLSVLVYQKLENNLVEKFNYLQTKDKDSNINKTQFSPKIQRIEDIKELQKEDKKGGQLGNLIFVDPENTSKQCPNCLEIGQRKHSRPTHDFVKCKKCGFDTRNDDTKKGFDFIDGGDTLAAYNIAKRGLKFLKEKNNL

SEQ ID NO: 2 - protein, 1130 aa, unknown
  Metagenome-Derived Sequence
MMNDFQNLYEVKKTVRFELKPSKETLVILNQEKIFEPPNFQSKIFIKNNTEKIEAEKKVKNYQFCINFNTLKDLIKECDKKFQKAKDIQNYLEKNPKILWSVWIDPEKIKIIDKDLKYKLQEKKNWKKEFWNEIIKKKSSYQVQWKKGSLFTLDDIDAYFEKIRSAQNSERKAGKFTIQVLEKISYLLHQYEIRKKQILLENNLQDISFLKKKELVARIRSFFGMFLNLERTFSLFVPEYSTEKAKFDPDLKDIFDEYKNDLEKIIQEIEIIFKESDLYLHNNVQRRFSFNIRAINPNPESTDKTENQKITEETILKKIEEIENEILKLKNQKATLKGERKEKGQLHKNDEWNKILKQLNPSNKEGMFSKLSELRRDLEEVKITHYAVLIEKEENFFLVMENKKKQDNSIKKINEFSLLNLPNGNTCKVLMYNFLTFKALRRLCLEEKSSMKTENFLNISNTSWKEQVGNGKRLREVNRDWKKVEYFENLKKYLIFITKNNAQKIGVSFTEFQYQEWMNCKTLEELENLIDKQGYQAKWKDISWEELLKKDKIEIFQIFNKDFLLEEDFATSEKDKEKIERLKKAKKILGKNFISKQQKQNRKKDLFTIYWNNFIKDVNSEEWRIRPEGKFYVRLKDDISETQRLVGSDEKTNKARFFENKIFADFGLGINSTIDTVGSKAKKKEEVEKHIQIMNELHKNDSQDFYILGLDRGLNSLVSYCLLDSNLRIIKTDSEKNLYEETDPEYQLKKDFVCGDWSLVNSKGKFIKREECKFNNNNDLKAFWINVFGKLKMYYEFEKNNGFDIEKYVSQFNENKKGDKFLEFGNEKNKIRLYILKEKNDKGKTFETKFVKKEIQQGEDNRPLKNENNENIFKEIEENIWIVDSDENKVFDYVLSFYIEKAKRIFTLYKQQTLDSSIQYTEKDLEELLFESQDDLKEGFTNFVVGEIVELTQKIADTKKKKLYITLEDLSNYGNNKDFTQNIDNKSFKEEEHERNLSVIIYQKLENNLVKKFNYLKSKKDDSKINKTQFSPKIKRIIDINKFQEKNQLGNLIFIDPTNTSKQCPVCEHIENKNREKKNPLLDYILCQNNNCNFSTKENVDKKGFDFIDGGDTLAAYNIAKRGLQYIQSL

SEQ ID NO: 3 - protein, 1142 aa, unknown
  Metagenome-derived sequence
MVSNSGSDKRQETDYKYNNLYEVTKTVRFELKPSKETLEKINKEKLFKKPENTRIIKNDTQINWEELNSFIKKTKEFYGTYSNITDFLNNENCNFDNIHIYSELIRLCGGEARDLYQKNFARKGNWKKIITLENEKEADVSYKVNESSSIGTFNAKFDKNISNYGKGIVGELIVDKLEEYKNVLNVKIIKLEAEVTQQEKAKSFTNEYLFGKIKTLCITLEKVCNLFLQFNLNQTEINEKDLEDKFSEKCKLLNFEEVKKLVVEILEEIELYNNKNAKRKYTLNLRGICPRVLDSSKETIKDYTKTEKEILEEIDELEAELQNLKDTKKELKTKRSHIKNEIAIKITDITNKENIKLDKNKLKDWDSKKIIKIDLQKNFKLNEKSNLDQVKKFTKEIIEKHVSSNAKVNISNNCQEIYNLIFQPYVFEKETKQKTFLKIHKECEEKNKKFQEKSSTLNQLQKDLENIRISHFAKIISFNGKYFLALEKVIDENNKKKQLSGFALNNLQSSQNSNYKILNYKSLTFKALKKLCLERDGTIFAGFLRDEQGNWIYEKDKNGKIKKDKRGYPKKQKDEEIKKLWGKYLSESKGFTNNDFRTFKIKLKGILLNPRNDFDFIFDREFVNSVFYTSQNMEDLIRNIEESFYNLSWQNCDWKNLKQFEKDKKIELYQIYNKDFALDEYFARDTESDKNKLEKQKESVKNEKYKPNLFTIYWNNFFSQISNLTCKCDKQRLIPEGKFYVKLASETEKYKVIGDKKIENRKSQNKIYGDFYFIFNPVAELNNKKKLEIRASAQEKQPKNRIKSFNKYLQEKVEGKNELYFIGLDRGENSLVSYGLFKFKKKKIESDDVLVRFDSKVGEENWVLDEILELQDLSAVKVFNQKGNWQKSIFVEQKEDEYFYNKKEDGDYDEILNFKNGGKRKTELEKENSEAVFCLLPIRNKQREKTGAYSLKCLSWKEDNGVVYNYRVAQEKLREERLEQLKLQENFKDLSEDEKERILEQREIDLQETEEFKNGFVSNLVGFLAEKVEKYEALISLENLNNSGGKEGNLNKTFGATVYQIIENRLMSKFSYLVIKLNKQNHSQIVPKIRKIEELKIDQITKNEKLKDYNLGEVLITDEINTSKICPNCGYSKIVLMIKKLK

SEQ ID NO: 4 - protein, 1165 aa, unknown
  Metagenome-derived sequence
MNDWQNLYAVRKTINFEFKPSLYTKKRVLDARIKRNSVLIDVKNNTIEIIHLFNTQNQEVANLVQRYLQKLTSDFDILVEKFKNITDGIYINGRYENFRIYVETSKLKLVGKDFRDCYFQMKNERGKSRKGWDYYYQFNAKTNKAEFRHVKFGDFLTVSHLFAFHYDKTTKDGEFQRLLKEKINFFIKKYKCIQIELSDFLDDNNRFEKFISKPEILDRLKRLAYCIGDILSLMNIFCDKGKNGSDGCSVFIKDLGDFRIIALDNDYESVVAEIIRQVNCITNPKAFHFKFTLNFKAKNPNTQLSGNDVFFNEKDLQKKLKEEMDKLENNKKEKSECQSFLSKFDNLAGKDCTDGRWADIKNKQGLPDNYQDAKKEYESCEGKKKELSKEIAYNENEKNNYAVINQLKAAISNSKNTHFGVVIEKEANYYLALENKISNGKLKADNKYVLNNLKNNLFSCKLLKYESLTWKAVEKLCLLPTSSLNGTSKDVVGYWSKFCKGVIILEKKNEKDKRDVFDLGIIKNYLVEIMSKTNISSGFNKEDFDKLVTLDGIKAYFDDYCFENQWIDADWDEFLGLDREGSIDLYQIFNKDFELDEHFAISENDKERIKRIKFAQLILKERFVAKQKNSERIRNLFTIYWQNCFNKFDTEKFRVQPEGRIYIRDMSPVNDAKRYREEKVLGDFGILFNPVAKAIDQSSKDVKDRIGNFNDYLKKQPLKNEIYVVGLDRGENSLVSYTLVKFRKKIVGENDISVRFDSLIGTEAWVLDEMVEVRDLSAVKIFNEKGKWRKSEFVEQKEDYYFVEKNEGNYDEDKNKQDACKKRDELKKMYPDYGDGRERVVVCPIRCKPQTKKEKQQVEMEKTGAYAVKILSWEDEDGAVYNYRVAQEILKEERLSQVEKNRDFELFNTEKFKNGYVSALIGFIGERVETNNAYVSLENLNMGDKTGKGGNYRKTFGASVYQMIENRLMSKLGYSVVKGSSSVHSQKVPKIRKVEELKKDVLSGEKNNKDFQIGVIQITDETNTSQICPNCGYSMNRYGLAKIENGELKLTLNAEELKDKDFGIDISKVTIFRVDDGVFAWRYSGVATEKLDKSHNDFCRVLSKTRQNETKSKDFIRCVHCGFDSRFPTKNHEKLKKVNGGDVLAAYNIAKRGLEFIQCKSEVIN

SEQ ID NO: 5 - protein, 1161 aa, unknown
  Metagenome-derived sequence
MTQQIEEKQSSQNSVWDNFVNLYAVRKTINFEFKPSISTKNRIEKIIQEESKLINAERNTIEIRNFFNNQIQENVKLTKRYFNENLENFDEILNKFKEITGKIKTKNNYENFRIYVNTDKIKLLGKDFRDCYLAMKKKKSWKYKGVNNTLKLIKFNDFLTICHLFDYNKDTKTNENEFEKLFSEKTELLIKKYEFIKKQLKDFLDVNNDVNNQAEKFITKPEILDRLKSMAFCLQEMIAVMNIFCDEGKNGSDGFLAFVEDLKGFRKLVLDKNCEEIIDEIIRQANHITNPKAFHYKFTLNFKAKNPNTQLSGNDTFLSEKKLQEKLKQEMDKLEANKKKKSDCQSYISKFDNFGEKKCTKDQWDLVLNKQGLPDDFAEAKKQYDEAKKIKKKSEKEISDNQNEKNNYAVINQLKAALRNSRNTHFGVLLKKDGNYYLALENKILDGKLKADNEYVLKKLENKKASCQLLSYESLTWKAVEKLCLLPTSSLNGKDEDMVEYWGKFCKSEIILEKKNDNDKRLLLDTEKIKTYLKKIVSDNSLSKFFDEKTFDECKSLDEIKKYFNDACFTNKWVNADWEEFLKLDNEGKVDLYQIFNKDFELDEKFATSENDQQIIERIKKAKENLEKKFVPKHNNTERGKSLFTIYWQNCVNDLNVDKYRLQPEGKIYIRDKSPIQKSKRYQEKKVLGDFGVLFNPITKEIDQSSRDGKTRIGNFNNYLNKYSRDEICVIGLDRGENNLVSYGLVKFKKKIMEDSDIKVRFDNEIANECWALDEIVEVRDLSAVKVFNKNGNWEKSEFVKQKEDFYFTEKNGTNYDEEKNKQSAENKKTELKNQYPNYKDGKERIVIIPIRYKPKKDEEFQKTGAYAVKILSWEEQDGSVYNYRVAQEVLKENRLEQIEKNKDTELFETEKFKNGYVSALVGFIAEKVKKYNAFVSLENLNINKAKQGNYEKTFGASVYQVIENGLIIKLGYLILKNNPQNYTQLVPEIRRIEELKKGNDEKDRNYQLGFVQITDETNTSKICPNCGYSKNRLESANTANGMLKLSLKTISLKNDDFGIDDSKKKNFLVDNKTTAYKYAQDGIICEEIKSGNSDFAKTFCDPRQNMTKSKDFIRCAHCGFDSRFPHNNCKKLEKITGGDTLATYNIAKRGLEFSQEIKKT

SEQ ID NO: 6 - protein, 1219 aa, unknown
  Metagenome-derived sequence
MKNFTNLYEVRKTINFEFKPSFSTQKRVLKDRIKEISTFKDEDKHIIDIIDFFNNKNQEAVIQTREYFKNELDFFDTVFESFVQIMNKIESKKNYENFRIYVNTAKIKLFGKDFRDCYQEMSRARTRKGRGWDYYYSFNQGTQKPEFKTVRFGDYITIHHLFAFQYDKETKIGEFEKLFLNKIKLIKQKYEYSKIEILDFLNTKNQTEKFITKPEILDRLKNMAYCLQDILKIINIFCDEGKNGSNGDASFLKDLEGIRKLLEEKNIEEVTTEIIRQVNQIINPKAHHYKFTLNFKAKNPNIQLSGNDTFLSEQEIQEKLKTEMDNLEKNKKDKSDCQSYISKFENIIDEILINEIFKNKTKFIDKINNNKKFIDEAWDKVKNKQGFPDNFEEVFLKYKTNIKTKKSLDTDIASNQNERNNYAVINQLKAALRNSKNTHFGVILEKNKNYFLALESKILNKKLKADNKYILKNLENKNNFCQLLTYESLTWKAVEKLCLLPTSLLNGKNDEIIKYWSKFCKGEIITENKKDGDTRDLLNIPKIRKYLSEIVKQNKLSKFFNKNEFEKCVTLDDMKSYFDDNCFVNNWIEADWDEIYKLDENGKIDLYQIFNKDFELEESFATSKNDKEIVKRRKSAQEKLGNDFVSKQLNTKRRRTLFTTYWSNCFDGFDTEKYRLQPEGKVCIRNISPINNSVRYTEEKVLGDFGILFNPITKIVDQSSKKGKERIENFNSYLQKSIPKDEMYIIGLDRGENSLVSYALVKFKKKRLETDDISVRFDNEIGEKSWVLDEILEVKELSAVKVFNQKGKWKKSEFVEQKEDFNFVQKTGENYDEELNKKNAEFKKEELKKQYPNYKNRKGEDKERVIIIPMRQKEKEKAGVRQIKTGAYSVKICSWKEDDGSIYNYRVAQEIIKEERFRQRKKQKEDNLIDTEKFKNGYVSNFVNFIAAKSAEYGAFVSFENLNISGGKDGNLEKTFGASVYQVIENKLMSKLGYLVQKSIPNNHLQFVPKIKRIEELNKDIVSENNKNKNYQLGFVQITNETNTSKLCPNCGYSKNRYKSAEIEDEMINLELKDLKLQNEDFGINTFKKIKFQIDNDIKAWRYAGVTTEGLDLNHKDFCKVISDPRQNIKKSKDFIRCVSCGFDSQFPEKNHSKFEKINGGDVLAAYNIAKRGLEFITQKNQSGPSSILHAIILHKNWISIKFGLNSLLFINKKICYNR

SEQ ID NO: 7 - protein, 1130 aa, unknown
  Metagenome-derived sequence
MNDDFKNLYEVQKTITFELKSKYIDYFYKNGQCVENKNCFINFEKTSKFMEKNYFSTSQNKGNFDCVLKFLETTDKIVRFADNFATNFSNGNILARGFEVKKKLLEKYDRISFFELKKRKQITVKRKNVNTGKTYDHFLYFSDRMNLENLFEMTNDQHGINFCQYLEKILNRIKLYRAKMENNLTVNNDNEFTFNKNKVVFCSDAKIYFEEFKTLLDIFSLIERDKKVGIYTIDNEVNETNKIIEVFEFINNKYSITLKSNLGSIIEVVNKEAKKPIILTSLNPRVVNKDSKKTESEFQNIQEFEKEIEIEEMEMDAINIKKFEYVELLEKKLKNSLDELKVLKTDIQSLINKKRRNEKLLSNEIALWKEFQFAKTILKYIKLNGVVISNKKNGRGEYQDVFNYRKSGERLNNPKNLLGIGQHPLFHLFKEEYDNYKNLCGEKFRKAKSLGDKKSLYNAVSREVLRQKEMQYLSFLAKDSYFYYLVLIDKDFNKDRKVIDQIGGCTGNWQMLDYYQLTFKALEKLALLGESTFDINNQDITKEVKLIWQNYKEKKFKEYRLCREEKQGLNRFEIDNKKESLQKNELNKLIDFIKKVINKLPDSKKYNFQFKSTEQYKNLDEFKKEIDEQGYFSEWISIDKEKLLQLEKETQKEVLIFKLHNKDFRKVAIDEKRKQNLFTEYWLDAMRLEKEVRITPEIDIFKKNKEEGNVPEKRVLETSQKEVISSARIYQNKLYGAFRLKFYPNRSCSFEKVNEKIKFKDNVCFLGMDRGEKSLISWCLIDNTGKLIKNGDWTKFDDEKNSDKKANYAEKLKIYKEIKECILQDYERIAECIGSEEKQKLIDEVKKKEKELEAKSLLATETIKQGYCGHLIKEINKVLLDYPNTYIVLEDLDIQGKSESRESDITNKMDNLAKTMGATIYQTIENALVNKFKYYSVKTDLEKYDGQQLVPNIVKVEDLRICDKENREYGKQKFIKSKDKIGNILFIDEYLTSNECPNCGFNHEKIKNLNFNFQESDQNYILENNGEKYLFSKDWFKEERVKNVLYDKKIKQIFFPRAVKNPFIKSSKSKKDFFYCSKCQFSSENNLVNLGLINGNYQIKTGDDLAAYIIAKRGLTLILNKKKEIGSFDF

SEQ ID NO: 8 - protein, 1143 aa, unknown
  Metagenome-derived sequence
MTLQNLTNLYEVIKTLKFELKPSINTKERIKFDNIKDLKLLENPSELLQTTKELASLQRSIFGIIFNLGSENIIIHKNLIKIIDSDVFYYFKNKQLSSIVSLSEVIKSIPEFSNTFDGFIKNIEDNLSKNIHKFESYILNIEKVYTKTEIGFAMKQYSLQIQKSHEVISLFVYKTGKIDGELKENLKKYFSFEDLENTIKICSQTMKSYNPTIGFEIHKFGFNSKSINKKADVDSLQKQCEKLEEEMEKLEEHKIQATQIFDAYTKQFNDYVIHGKERDEKTWGKVSEKLIPGDPKLEALKNNQTSSIQEIKEAKEYLKSIRDGNFDYQKINIAKNKFKKSLVFVDKIPNKKKENEYYCFGDNIYWDLKIKKTKKSIFYGKNKGDLFAKQTELFNQQKLTHYARLLRDKNNFFVAMVDRDCILELENIKEDKDIKEDFLKIMEYSSLTSKAVEKLIFERNVLNFDFKDEQFIICKKIRETRSYKEKGSTETQAQTLEEKQKLIQLVKFMNDAIGQINEKIENSVFDWKPFVIKDSFDDFEEFRKYITKSCYQTKRTKVSKDKIYELDKKGKINLYQIYNKDFGVDPYFAITERDKNSNFIEKKQKPNLFTIYWKDLFEQNGENIRLNPESKLYLRPSKKIEDIDGNNCDYGASKLRFKHNKIIADFQLVFYPTKKEKLEEIQKKIYNEIKEKTFSVGIDLGENSLATICLIDDEKRVVLDQNGNPIIKDLTLVNNKGGFVDIDNCFIENENYKRKDKLFIENDGSYFLTDWYFSSFLCQKPIKELSKEELKNVLIELEKMSPKELKITDTNGNKVFDYRYAFVYKQTENKIRYHLQSIGLNEEEKKFKELELMDTTRIKSGYVSKLVSYITDLAKEYNAVIVFENLDQKASYIKGITLLSEELFENVSSKEKSQLTGISVYQNIQNKIIRKCNLFMQKTGINTKLQITPKFKNIEEFKNFNMTNKDKNVGRGNVIFINEENSSKECPNCGFIPDTNPKIKDCKIVYKYNGEEKELNLDDEKIKDRKEYKKIGDLMQTRIKYTDLSKSGKWYIDGDPMVCVNCGYDTRKEARVKKHNLKSCDEIAAYIVAKRGLEFIKSQKVVESISQKQINNEKIEIHKNQKNNGFINEESTISGNIVFSGNI

SEQ ID NO: 9 - protein, 1123 aa, unknown
  Metagenome-derived sequence
MLENLTNLYEVIKTLKFELKPSKFTLKRCDFDRAFEADPHALFEKLRSVHRFQEQILDLLGKTSSKKIVIHKNLIKLIDADYFYQLKSKAISSNNTIAVLSQDFQEEFFNYIKEKFNRLHSTNYSLDYLLWADYLENPTTIDKKPTKSEIAFATKRYVHAIEKVEEILSNLIYKTGNIDREIESLLANYYNNQDLKPLLKVAKSYLQSYSPTSGFQVSKFGFNAKAIQKKVDVEKMEQEIGSLEKKMLDLEEKKIIATQIFDDYAKKFVQEKIKSDPKLLALRENQTASLDEIKRAKEYLKYLKEGDFDYQKILKERSKARKEKRDSMIKFTGDREYCELKLAKTDASVVYGRAKQAFFAKQQELYSQQALTHYARILRSEGNYFVAMIDRDDVSFLERLGTNDKVNNEKFEILRYASLTARAVEKLIFEKNALKFNIYDKEYKECKMIREKRSYKEKGNEDSRSKNEKQKENLKKLVLFLNSAIEQLNKKLEGGIFDWKPFLIGNDFDNFSEFQKYITENCYIARREAIDKQTIYDLDQKGKLNFYQIFNKDFSVDPYCATTERDRSSTIKNINLQSKKNLFTLYWQSLYTENSGTIRLNPESNLYFRPSRVRTEIDLCNDCEASKLRYRQNKIIGDFQLVFYPTKELPFDQLQQKILKNSEKSYAIGIDLGENSLATICLVDNEKKVVLDGNNKPIIKDLSMINNKGDFVEVEDCFIDGKPYERKQKLLIGGTETKPYMLGRHFPKHLQNKVIAEMSQDMLFEVLQILESLAPEKLGIVDKQGNKVFDYNYAFEHLKAINKIRYHLQVFNHTNDEMRILEKDLLASIKIRGGFVGKIVSYITQMAKKYNAIIVFENLDQEIGRIKGRYLFSEQSYAKVSPKEERMYKGISPYQLMQDKIIQKCNYLLTKQEIKGGMQISPRLKRQEDIKQLTLLKDKNCAWGKIIFVNEEDSSKECPNCGFVPGKYSSNINIKDDGIELMANKKDKKVFSFAENQLLSERREAYQKISDIDKKKALLIETRVGKTFLKSYMDIQGDPMICVNCGYDTRKTKRVEKYNLKSCDEIAAYIIAKRGLEFMENKGYETQEVSISVGGDSYNKPSDGEQDDSCASGVKLSGNISFS

SEQ ID NO: 10 - protein, 1129 aa, unknown
  Metagenome-derived sequence
MMEKLTNLYEVIKTIKFELKPSEFTLKRCSFDSSFESDPHVLFEKLKPIHKQQKEILNILSNLPPQKIVIHKNLIKLIDSDYFYRLKSKALSANNTLVVLSKEFQEEFSNYIKEKFDRLHSTNYSLSYLLWADSLEKPSNTDKKPTKSEIAFAVKRYVHAVQKVEEIISNIIYKTGNTDNELKTMLKSYYDNKDLGYIFSIANRYLQSYSPTSGFQVSKFGFNAKAIRKKVDVEKMEKEIRILETKMLDLEDKKVIATQIFDDYTKKFVQEKIKTDPKLVALRENQTASPNERKQAKEYLKTLKEGDFNYQKILKERSKAKKEQKKYEPKFTGDKEYCELKLAKIDASVIYGRAKGDFFAKQQELYSQQALSHYARLVRNGEKYFVVMIDRDNINELDNLGDNQIKNDDYFEILRYSSLTAKAVEKLIFEKNALNFNRYDKEYRDCKNIREKRTYKEKGSEDSRSITNDQKTKLRKLVSFLNEAITQLNKKVEGGVFNWVPFNISNEFDDFAEFRKYVTKTCYITKWESISKQIIYDLDKKGILDFYQIYNKDFAVDPYFAKTERDKNRIKKDISIMGKQNLFTIYWESLFGDNSSNIRLNPESNLYVRPAKVVEEISDHNPNYETSKLRYKENKIIGDFQLVFYPTKELPLDKLQKKILDEVDKSYAIGIDLGENSLATICLIDNEKRVVLDEEGKPIIKDLSMINNKGDFVELDDCYIDGQPYKRKQKLLVGGQGNKPYTLGRYFPEKFQNQVISKMSKETLIEVLKILEDIAPEKLGIVDNHGNKVFDYNYAFEHLKATNKIRYHLQAFDHTNEEMEILEKDLLASTKIRGGFVGKVVSYITQMSKKYNALIVFENLDQEIGRIRGMTLFSEQEYEKVSAKEERMYKGISPYQLIQDKIIQKCNYLLSKQDNTKGIQISPRLKRQEDIKQLTLLKDKNCAWGKVVFVNEENSSKECPECGFIPGKYSSNINIQENGIEIMANKKDKKLLLFENNPLLNERRIAYQSIPDTNELKKKSLLIETRVGKTILTETDMKIVGDPMICVNCGYDTRKEEWVKKYNLKSCDEIAAYIIAKRGLEFVENKGYENQSIDKPSQTNTFEENKKSKNSDNENSSYTMSGNINFSHS

SEQ ID NO: 11 - protein, 1037 aa, unknown
  Metagenome-derived sequence
MKKIILVFNKNIMEKFKNIFEVRKALRFELKASKITRENLEKENIYKNPVNILYKNKLEKGLNYSRTVFENDLKYFLDNSKNIILNLEKIKNLLDNTRFSEIFVEKKIFELIDKDFYIKFAKNKLSGGRSSSLQEIKKNLDWKGINLIKNYYLEIFENIENLIISIENLSEKESSFSKNEIKKFLRKISLEFIRIYNFLEKFDIKNKDFNKNLKEYIKKVINFKTFFEEIKSYYFISENQSSGILVRRFGFNEKSLKRRQPKEIKEELEENLKSFNEKLEIKEKLEEERQKLIQDFDLKLKTEKFEELLHPEKWSEIRKKKEKTKEEQEKLDDIDNQFKELKKLRNKDEEISKKTQELNRYKKDLGNLKVKINNLEKELENNLALTHYAKLLTNEINGEKLYYLVLIPIENKFILDEYISDEGNLEILEYNTLTFSALKKLALSYDGTMGIYWDKKEEINKKSNLKRWIVDLYIDLENGERQEEFYKIKRYVINLIKTYKNIFGNIYFDFKRLYDTKSLDEFKIEFDKQGYNLKWKNIDLEIIKKLEKEGKLEFYQIYNKDFYKNPDFFDIPYSIKEQKEERQRRRKSQNVKGNNNLFTIYWENFINDIANGNEEVRLNSDCGYFVKLKKEDKENHRYDRNKIIGNFGLIFNPGKKLTKKYDEKENIKKFNEIYKKEIKKVKNKSFIGIDRGEKELLTFCLIDENGNCIKNKNGEYIIGDFNLINNKGDFIPKDKCKYIDISGKEYKDLLGNFLPDFTHPENIISGKKSFQFDDEKNLYYFKLNHNARLYLLEGENKRYKIVNKEGKEIFLKDENGNNVIDYYLLFQSEVYKRHILKKTGNIKLEDVQELRGGYISNIIKQLNNWIVKYNGIIILENLDKTQIDEKGNIYKTNKEKVLEKTLGATIYQEIETLLNRKYNYFIFKDQDIGGLQLTPKVNNISDIKNLEKSKKNVNLGNIVFIDEYLTSKECPICKNQLFRDKKKGDNVYHNEKYPGNNGCSFDTRTNTYGFDFIKSGDDLAAYNIAKKGKEYIENLSN

SEQ ID NO: 12 - protein, 1194 aa, unknown
  Metagenome-derived sequence
MESFKNIYEVRKSIRFELKPYNVTREILKGDNDYGNLDSKIKHIKKGEFEENFNWNRFCLNGYSNFLEKSKSFLTFLEEVNLEIKKENWIKGKKDIYFDFKRLKGVFKNIPSLKKIEKFDNNFKDKLYEIEKEYKILFHIFQKLENKEKGEANEKKSEISKYLRKISYLNRNFLTIFKFFDEYKTDKYLFDNYKKLLDETFEKINNSIIASNENEKTGSCFGKFTFNKYSLFRRETENLKDKYYKNKKLLEENVKNIVETKKIKDDREKIIEIKLETILDLKLEKENEKIQERLEKFNFERNLDEVISELDYINGNILNNYIQNFIKDYKENKQTLIFKNESSNKYNKGKIILNNNEYNISALRGQTLEGGEYLTLLKKDYKDLNKDEKEEKRLVDKFLNIILKNKNINKDFDTIKNFRDKLAKYRGKLRQNFSASEREFINEAMIKYYAKILEKDGNYFLALTDKNNILDKNINNIKIDKNIKGNIFSNTFNIYNYSHLHFGALEKLCLMGDGDLIKNDGLIKQWNKYKNQKNNINGRCAIHQRYFDKKCENCKNDKEKKEKEFFSSFQSHIIKSLYKLKENNGEDWTQYITEIEKLETIEEIVKFINSNFYKLEKKEIKTEEIFELAEENEVELFQIYSKDFNIFNEKFLSGEENLRILKSGEGYREDKKEHGEETKLISNTKRKKDKKKNLFTIYFEEVFKNRDTFLGQEGGVFFRNANLESDKKRFRNNKFFVSFDIKFNKGTQNDNIKLCEKKEKILEEHIKNINYITISKLKNIKDENKIFIGLDRGEKEHISYGIYDGKLKFQGKIGHTNYVKKIGKEQEKFQILEQKDYENITLKIGNKIIKIEKPIYKQLTTTHKYFDENGKEEINLLELNGLQEYHILYIFKQGENGEYFVDLENGGKFILNSKKYGFTILDRNGEEIKIIDGNDGKEIIDYYLLFESEKFKRILEINDEIKYSENMFNLKKGYISIIKDFFDKIIFDYKKEGKEVIFIFENQTSNKKDISNKYLGSTILSDIEENIITKFNYLINKESNDKFQLTPKIKKEDILFKNNNIYEMFGNCIFINQDNTSTGCPNCKKIFLNKGKKGKIEEIPGNTLFGHGTGNNEGNMKHLTYEEYDNLYEKDEKFKKNHTNKNGKKIQNKYLALNNCKFYLQNQNFSEFNFIKSGDNLATYNIAKKGLEYINSLN

SEQ ID NO: 13 - protein, 1173 aa, unknown
  Metagenome-derived sequence
MEKMQNLFEVRKSLRFELKPYKITREILKGEDNYGSLSSKIKHIKEDEFEKEFDWNLFCKNNYSDFIIQSKKLSSFLEEINIEIKKEKYGKTKKSVFFDFKRLKGIFKNIPSLKKLTYFSKDFKNKLEEIEENYKIIFDFFEKLEDKETKNEKKSEISKNLRKISYLNRNFLTIFKFFHKYESDDFLVENLEKIKNEIGENFEQINNSIIASNENEKTGTCFGKYTFNKYSLFRRETEKLKDRYEENRKLLNENIKKIVETTEEDKKIKNDNGRNENIKLETIRNLELEKENEEVQNLLKNFNFDRNLDEVISELDNINGVILNNYIQEFIKDYKLNKQNLSFLNKSYSKYNKGEITLNSKKIFIKVILQTLEGGEYLHLLKKEYKNLSKSEKYEKKLVDTFLKIIFKNKEINKDFNTIKTFRDKLAKYRGKIRQDFRASEREFINEAMIKYYAKILEKDGNYFLALTEKEKLNGNINNIEIEKHIKGSISSNTFKVYNYSHLHFGALEKLSLMGDGDLIINKELAIEWNKYKNQKDKKINIDFKKFQSHIIKSLEKLRDDEKYNGENWTNFISKIEELKTIEEIVNFINSNFYKLEKKEILTEKLFELAKNKEIELFQIYNKDFNIFNDDFLSGEDEFLKDLEKGGEHGEETKTIKNTNREKKKKKNLFTIYFEEIFKNTDTFLGQEGGIFFRKGDKEFEEKRFRKNKFLVTFDIKFNKGKQNHNTKLCEKKDKILENHIEEINKYTLEKIKKIDSEDLIVVGIDRGEKEHISYGVYDGNLNFKGIIGNTNFIKKIGKEQEDFEILQQGDYENITLKIGDKIIKTEESIYKQLQTTYKYFEKGEKAEKVEEGYILEEGERLLELKGAEEYHIEKVFKQGNNGKYFADLENGGKFILNTDSYGFTILDKDGNKINIVDKNNGKEIIDYYLLFEAEKFKRILEINDQIKYSENMFNLKKGYISIIKDFFNKLIFNYKKEGKEVIFIFENQTSKKHSIGKNENEITNKNLGASILSDIELNIITKYNYLTNKEDNYKLQLTPKIKKEDILTGKKGDNEEFNFGNIFFINPSNTSSSCPNSKCLKTLFGHGTGNNEGDMKHLTDEKYDNLYDSDEKFKKNHTNDKGSKKENKYLAGDNCTFHLQNPDFSKFNFIKSGDDLATYNIVKKGMKYINSL

SEQ ID NO: 14 - protein, 1098 aa, unknown
  Metagenome-derived sequence
MVNLESFKNLYEVRKTVRFELKPYKKTREILKDNNYQSLDSYIKHIKDEFEDGFDWNDFCLKYEDFLKESKKYYFLLQINAEIQKRNETTKKNIYFDFKKSKGIFKNIPSLKKIQFELKSKLLEIQDEYQNYFNFFDQLQDKQHKNEKKSDISIHLRKIAYLNRNLFTIFNFFDIYKTHKEILDEYKEIIDYDFEKLNNSIIASHENEISGACFKFTFNKFALFRREASPLKENFEANKQVLQKAVATMVENGEIVNDNTIAGINTNQIHSLTLQKKNCYSLKFEEEITLQGRLEKFNFNRNLDEVISELDDINGQLLNQYIQNFVNGYKNDENVLEVSFYTDHEGNKIFDKSKKYDSYENGQKKEKFYPSLVKLDLEQFVEAQKRNQIKIQPGQTLKYQYLNLLKADLTDEEKEQKKIVNKFLQILFKQKFINPDYNTIKEFRDTLAKHRKLRQNVRTSEREFIQEAMVRYYGQILEKNGCYFVALFDKDKLQNDIKNIVTDSQIKDKMEGNYFKIYKYSQLSFSALEKLCLSKDDLLSNSSLQKAWDKYKNQKKDIERCDFHKNQDKSCTSCKSNEMQMRRSFLKAFKMHILQALEKLKNDEKYKEDWSYLYELKQKNSVEDIVSFINQKFYKLEEKYIEQEEVFKLADTEILLFQVYSKDFNIFNSDFVSDEENLRDYEKDTESQKTIGTSKREDGKQENLFTTYFKNIFKDDETFLGQEGIFFRKADSESDKKRFRSDKFFISLDILFNKGKQNNNAKLCESKEEKSKKHVKNTTLNIFNSIKNKDEITIMIDRGSLSDELSVKNTKISMLYVIITLRKEDKQYVLKEIKKSDINFIRGKGGGWKIVGKGQNMSSETNAKDYIDFKKILSNLKEEIQKELEKNNVKRNILKIIDKKEITSLLISAISQLIQEYNVDYIALENLDNIYEDDKSFKKIMEERTLSTYLYQNLEVQLFKKLNYIYLKNEKVQDRQIFPICSIDEVKNLDSKNFFKIKESSNYDDYKMINIVFVKTSGTSSTCFNCENTIKKHGVVCKNCKISVKHDGSKLDLKDYKAKFVSKNILEKQNIQQDFNNDARALYIAKKAKEYLEYLFSH

SEQ ID NO: 15 - protein, 1122 aa, unknown
  Metagenome-derived sequence
MEDLKNLFEVKKTVRFELKPYIETRKYLKWNNDYSTLNSYISHIKMEEFEKWFDWNEFCKSQYSDFLDKTEYISEFLEEVINELNKKNNDKKRKSIQFNFKWFKWVFKNIPSLKNIESFPRLKEKIEEMTESYKSSITFFDFKKDNDDKQSNQKQSDVSKELRKLAYLNRNFLTIFKYLWSNNGNETDEGILKKYEEVKNKLWENFKKLNSSIIASHQNETSGACIWKYTLNKYSLFRRETRKLKEKSRKSKKAIDKDVDFIIKNWIYDDKWFEIKLKKEDITNITLKTDFSDNFEKHIESLWLQYKLENFNFNRSLDEVIEELDLINAQLLNTYITYFKEEYEEFWESLLDIEFQTEFKIDNEWNNKPFNIYNNKSKPPKIRKLWYFSNEEGKYITLNQWQTLEWYEYLNLLDLEQKDLTDEEKYQKKLANKFLQIIFKQDFINRDYNNIKQFRDKLSKYRGKLRQDVKNSEREFISEGMIRYFWSILEKDWNYFLALTEKVDINWENKIDSIENIEIENTLNDNCIEWYFKIYKYHQLSFSAIEKLCLLKDWPDADNEKLIKYWDKYKYQKKDFKDYKDKSDFLSLFKKQIIDLVYLLKSDNKYNWYDFSSFLPKIEKFNSVEQIIEFIDHNFYKLEEKYISEEKLFKLADNKDILLFQIYNKDFNIYDEIFLSNEENIKEEKYSEKRKLLEIIDRKKDAKPNLFTLYWKDIFKNEAFLGQEWGVFFRKADLEKEEKRFRNNKFLVSFDVRFYKWKTIWDVKICDKKAQKTEKSYKKITLNYFNEIINKDKITILGIDRWSISSAINEKTKIAMLWFCVITLKKEKSNYILEDIVRTWDINWLIKETIKERNVNYIEFWKPVKKASGIKIDIDFKNVLLELKNNIMQEIEKKWQDRRDLQRILDKKIWLTSFLVNEIQKVIVEYDVNYVALENLDNIFNSTNKISFKKELEINTLSNYLYQNFETQLLNKLQLFTTKTNYNNKKQFIPNFKIDELKELPSNNWFLHTKTWKTIEHDFKDFKILWNTIFVWTAGTSSECFNCWEKIKKHWLICKNCNIDDRLKLKDYQENFVSKSILQNMDLQSDSKWKKLFNNDVRAWLVIAKKAKEYLEFLEKQKNNNS

SEQ ID NO: 16 - protein, 1315 aa, unknown
  Metagenome-derived sequence
MINLENFKNLYEVRKTVRFGLNQPNKKGDFKTHLEFKDFTEKSFQNVENELASNGKYNIGDEEQLIKKISAFVEQLKIQLGYWKVFYQRYDLIAINKDYYKILARKAKFDAIWEISKSNKYIKVKQPQASQISLSSLKIGNRSDSIIQYWGEIIEKTDYLLNIFKPKLEQYERAIKDANNAHIKPDSINFRKTFLQLLKLTKEFLQPLSDRSIIFEFSKKKVSKEIEKISEFAGEKNNTKIYNVLKNGEELRQYFEANGSQVSYGRVSLNYYTAVQKPNNFDQEIKKSIDDLGIINFLKKSDSQIIDYLHQGSKQKIKLLLTSKHPYPIELLQLFKVKPIPFSVKYNLAKFVEKNYKSETNLSYEDILNKFNLLGRAIDIANDFKNSNHKGNFSLDEYPVKLAFDYAWENTARSLKRDISFPKKVCERFLKDNFDIDVDNADFKLYANLLFIADNLATIEYNNPNNEAELINEIKQAFECMSFSFEKKVYEGHKKAILELLDKEKSQRDYSTISKAKQELGLLRGGLKNKIKKYRDLTQRLIDKKNSHFGIASFIGKTLATIRDGLKEENELNKISHYGVIIEDNNQDKYILISKLEGKDRRDKIVQKLGKGDIKVYQVNSFTSKALNKFIKNPLSEDAKKFHGKYKDEYGFGYENKNGDFTYKVKNVSEYDEQGKWIGYQEEFLNHIKKCLIDSEISREQNWTAFGWSFDGCNNYEEIEKEIDSKGYQLTENSISKGNLESLVKDEDCSLFPIINQDISSQKQENKNIFTLDFEKVFERKECRIHPEFSIFYRKPIEEHKKENKSGIINRFGRLQLLANLGIEFVPRNLSFKTKKEQNRIAIDQKKQNQLVQEFNQEKVNTYFEGLDNYYIFGIDRGIKQLATLCVTDKGGVIQDFTIFTKHFNQASKIWEYRENRKEGILDLTNLKIESDKNGNTYIVDISLFDAKDDNGRSTGTNKQNIQLKQLAYIRKLQYQMSANEKGVLDFIAKYISKDEREQNIKELITPYKEGKKFADLPMDIFQEMFENYYRLKTDQNLSEFEKKNLMKITTELDASENLKKGVVANMIGVIYYLMKYYDYKVKITLENLNQSFGGQVDGINNHYVDIKNNFMYQENQALAGVGTYHFFEMQLLKKIFKISTEEGILHLVPSFGSVKNYFKDIEKYSLIVNIGRNEKYNQFGVVHFVKPDNTSKKCPVCLNTQTTGKKEGMPIINRNYKKSNIFYCERCGFQSIHSHCQEENIKDSNDFHYSVEEVERIEMKNKEAIEKYKKQGKNLHFIKNGDDNAAYNIGEKIRELPKKSDVKNTSISGNISFS

SEQ ID NO: 17 - protein, 1297 aa, Absconditabacteria
MVNLESFKNLYEVRKTVRFGLNQPNKKSNINKTHGQLKDLVDLSFEREKKLINNEKNQVLIDSEKALIEKLQQYVNGLEVQLENWEGTYQRYDLIAINKDYYKILARKAKFDAMWEISKFDKKSNKYIKVKQPQASQISLSSLKIGNRSDSIIQYWGEIIEKTDYLLNIFKPKLEQYERAINDANSTHIKPDSIDFRKIFLQLLKLTKEFLQPLLDRSIIFEFSKKKVSQEIEKISEFAGEKNNTKIYNVLKNGEELRQYFEANGSQVPYGRVSLNYYTAVQKPNNFDQEIKKAIDDLGIINFLKKRDSQIIDYLHQGSKQKIKLLLTSKSPYSIELLQLFKVKPIPFSVKYNLAKFIEKNYKNEINLSYEEILDKLNLLGRAIDIANDFKNSNNQNNFSLDEYPVKLAFDYAWENTARSLKRTIPFPKEVCKQFLKDNFDVDVNVDNADFKLYANLLFIADNLATIEYNNPNNEAELINEIKQVFDSIDFSFDKERYGGYKNDVLVLLNKAKPQRDYSTILKAKQELGLLRGGLKNKIKKYRDLTQRLIDKKDSHFGIASFVGKTLAKIRDRLKEENELNKISHYGVILEDKNQDKYLLISQLDGKDTREKISQKFGNGDIKVYQVNSFTSKALNKFIKNPLSEDAKKFHGDFRYKHKEVSIYDEKGKWTGYQESFLSHIKKCLIDSEISREQNWEAFGWNFAGCNTYEEIEKEVDSKGYQLTENFISIGNLESLEKDEGCLLFPIINQDISSQKQENKNIFTLDLEKVFEGKECRIHPEFSIFYRKPMEEHKKENKSGIINRFGRLQLLANLGIEFIPRNSSFKTKKEQNRIAIDQKKQNQLVQEFNQEKVNTYFEGLDNYYIFGIDRGIKQLATLCITNKNGVIQDFDIYTKHFNSESKKWEYKFHRKDGILDLTNLKIESDKSGNKYIVDISLFQAKDEDGNPTGTNKQNIQLKKLAYIRKLQYQMSANEEGVLSFLEKYKNKEEREQNMKELITPYKEGKNFVDLPMDIFQEMFENYYRLKTDQNLSESEKKNLMKITTELDASESLKKGVVANMIGVIYYLMKKYEYKVKISLEDLSNAWFFSKDGLSGDVVLNTKNDGTMDLKKQDNLALAGVGTYHFFEMQLLKKLFKISTEEGILHLVPSFGSVKNYTEIFKDKGKYVYKQFGIVYFVDPRNTSKKCPVCLNTQTTGKKEGIPIINRNYKKSNIFYCERCGFQSIHSHCQEENIKDSNGFHYSVEEVERIEMKNKEAIEKYKKQGKNLHFIKNGDDNGAYNIGEKIRELPKKSDVKNT

SEQ ID NO: 18 - protein, 910 aa, unknown
  Metagenome-derived sequence
MAKFMEKNYKSEINLSYEDILNKFNLLGRAIDIANDFKNSNNQNNFSLDEYPIKLAFDYAWENTARSLKRTIPFPKEVCKQFLKDNFDVDIDNADFKLYANLLFIADNLATIEYNNPNNEVELINEIKQAFECISFPFDKEVYKGHKEAILELLDKEKSQRDYSTILKAKQELGLLRGGLKNKIKKYRDLTQRLIDKKNSHFGIASFVGKTLATIRDGLKEENELNKISDYGVIIEDSNQDKYLLTLELNGKDIRDRIRNSLGNGEYKTYEVNSFTSKALNKFIKNPLSEDAKKFHGKYKDEYSFGYENKDGDFTYKITKVSKYDEQGKWTGYQESFLSHIKKCLIDSEISREQNWEAFGWNFAGCNTYEEIEKEVDSKGYQLTENLISMGNLKSLVKDEGCLLFPIINQDISSQKQENKNIFTLDLEKVFEGKECRIHPEFSIFYRRPIEEHKKENKSGIINRFGRLQLLANLGIEFVPRNPSFKTKKEQNRIAIDQKKQNQLVQEFNQKKVNTYFEGLDNYYIFGIDRGIKQLATLCVTDKDGVIQDFDIYTKHFNSESKKWEYKFHRKDGILDLTNLKIESDRSGNKYIVDISLFQAKDEDGNPTGTNKQNIQLKQLAYIRKLQYQMSANEEGVLNFLGKYKNKEEREQNMEELITPYKEGKNFADLPMDIFQEMFENYYRLKTDQNLSESEKKNLMKITTELDASESLKKGVVANMIGVIYYLMKKYEYKVKISLENLSNAWLFSKDGLSGDVVLNTKNDETMDLKKQDNLALAGVGTYHFFEMQLLNKLFKISTEEGVLHLVPSFGSVKNYIEIMKIKGKYVYKQFGIVYFVDPRNTSKKCPVCGKGGKKYISRVDNVVTCKNCGFDTSSDNSILINNYKKQGKNIHFIKNGDDNAAYNIGEKIR

SEQ ID NO: 19 - protein, 1234 aa, unknown
  Metagenome-derived sequence
MEKNEIAISEYQTQKTIRFGLTATNQNLYSEEIMKLLDISEKRVEKQAEQAKKVNNDADKNNQLRCCLDQIKEYLKTWSNIYPQIDFLAITKDFYKVISKKARFDFDKGNGSEIKLSYLQSTYYNKKRYLYIIESWKENLRKTENLYRKSDDLLKVFEEAKNQNRDDKKLNKVELRKTFLSLFNLVNESLKPLIEGNLFIVNDDKIDEQNPKHDCVSVFISKTEERRKLYDYICDLQDYFKDNGGYVPLGRVTLNKWTALQKSNNRDAEINRIIKELKINSVSIQNIEYEYNNFANNFKEKKDENGKIVKNNAGNIIWDLKADAKSVIEICQFFKYKQVPINARLNLAKRLEKSIDFLSEFGVSKSPALDYKNDKNNFNLTNYPLKIAFDYAWENCAKAKHEEIPFPKEQCEKYLKDVFDIDIECKEKCQNKECKGCEKCRGYYLNKYADLIRFKILLGRLKAEFHKTDEEKNKSNIQELRNIFRDLDYRGDKRLNKNEIQKAVNAWFDNKEQSIGRKKEDEIHLMENEKNKFSLSMQIIGQERGGLKSRISKYKALTEMFKVCASKFGKQFADLRDYFNEAYEVDKIKYRAWIIEDEKQNRFILFVNKEKEVDLTSEEGDLYFYEVKSLTSKSLVKFIKNRGAYPDFHKINNRQIDLNSGEKDSRGNFIDDVKIHWSTYKNNQKFLDKLKDCLQNSTMATVQKWSEFEFEFDFSNCDTYEKLEKEIDRKGHKLERKTISLTTITNLVENTACLLLPIVNQDLNKGNKQAKNQNQFTKDWFDIFENKKRLHPEFNIFYRFKTKDYPNTKFKNGTEKTKRYSRFQMLAHFGCEVIPQGDYLSKKEQIAIFNDDKKQTEEVKKYNKNISSDVDYVIGIDRGIKQLATLCVLDKNGVIQGGFQLFTRTFNSETKQWEHQELEKRNILDLSNLRVETTITGEKVLVDLASIQTKNGENRQKIKLKELAYIRDLQYTMQTRASDLLDFASKINSADDITENNIKNFISPYKEGEKYADLPQKEMFDLLTEWKNAEEEGKRKIAELDPADNLKSGIVANMVGVVALLCAKYKYRVRIALEDLTRAYGIQKDALSGATIFQNDEDFKEQENRRLAGVGTMQFFEVQLLKKIFKVQIDKDLHLIPAFRSIANYEKIVRRDKQNSGDEFVNYPFGIVCFVVPKYTSKRCPKCEKTNVNRKENIVICKECGFQTKEGNPYEKNNIHFITDGDQNGAYHIAKKAL

SEQ ID NO: 20 - protein, 1257 aa, unknown
  Metagenome-derived sequence
MDADKTTKAINEYQTQKTIRFGLTATNQNLYSEEIMKLLNISEERIIKEKVKVNNDTDKTNQLRGCLVQIKKYLKTWENIYAQIDFLAITKDYYKVISKKARFDFDKGNGSEIKLSSLQSTHNKKKRYQYIIDFWKENLRKTENLYRKSDDLLKIFEEAKNQNRDDKKLNKVELRKTFLNLFTLVNESLKPLIEGNLFIVNDDKIDEKNSKHNYVFYFISKTEERRLLYDNICTLQDYFKNNGGYVPFGRVTLNKWTALQKFNNRDIEINRIIKELKINNISTQKTDYKYNDFTENFKEKKDENGKVVKNSAGNIIWDLKANAKSVIEICQFFKYKKVPINARLNLAKRLIKDNKLKKEQENTFLSEFGVLKTPAFDYARDKENFNLTNYPLKVAFDYAWENCAKDKYEKIPFPKEQCERYLQTAFEIDATKDENKKLIDTHLNKYADLLQFKILLERFKAEFHKTNEETNKNNIQKLRNVFSGLDYHGDNRLNKNQIQKAIEAWFDNKEQNIGKKKENEKLLTENEKNNFSLSMQIIGQERGGLKNGIPKYKELTEMFKVCASKFGKQFADLRDYFNEAYEVDKIKYRAWIIEDDKKNRFVLFVNKEKAFDLTSEEGDLWFYEVKSLTSKSLVKFIKNRGAYPDFHDVKNSFHYSSIKKDWQNYKNDPEFLDKLKECLKNSKIAKDQKWAKFCWDFKQCDTYEKLEKEVDRKGYKLEGCKSEPKTISLTQLTDWVENKDCFLLPIVNQDINKGDKRTKNQNQFTKDWFDIFENKKRLHPEFNIFYRFPTKDYPNTKFKNGTEKTKRYSRFQMLAYFGCEVIPSGNHLSKKEQIAIFNNDKKQKEEVEKYNKSISSDCDYVIGIDRGIKQLATLCVLDKNGVIQGDFQIFTRTFNKQTKQWEHKELEQRNILDLSNLRVETTITGKKVLVDLSKIKDDEGNYTNLKQTIKLKQLAYIRELQYAMQTRPDDLLDFVKSINSANDITAENIKHFISPYKEGKNYDDLPKVEMFNLLKEWGNADENGKRKIAELDPADNLKSGIVANMVGVVAFLCENYNYKVRIALEDLTRAYGIQKDALNGTAIYQNDEDFKEQENRRLAGVGTMQFFEVQLLRKLFKIQVDKNLHLIPAFRSVDNYEKIVRRDKQNSGDEFVNYPFGIVCFVDPKYTSQQCPYCNNTHKHKKNDTETGKKAFYRNKGENKNSLLCEKCGVSTIEGEETLSSKNDNKKQFNIHYITDGDQNGAYHIANKVVINFQKDS

SEQ ID NO: 21 - protein, 1232 aa, Sulfuricurvum
MLHAFTNQYQLSKTLRFGATLKEDEKKCKSHEELKGFVDISYENMKSSATIAESLNENELVKKCERCYSEIVKFHNAWEKIYYRTDQIAVYKDFYRQLSRKARFDAGKQNSQLITLASLCGMYQGAKLSRYITNYWKDNITRQKSFLKDFSQQLHQYTRALEKSDKAHTKPNLINFNKTFMVLANLVNEIVIPLSNGAISFPNISKLEDGEESHLIEFALNDYSQLSELIGELKDAIATNGGYTPFAKVTLNHYTAEQKPHVFKNDIDAKIRELKLIGLVETLKGKSSEQIEEYFSNLDKFSTYNDRNQSVIVRTQCFKYKPIPFLVKHQLAKYISEPNGWDEDAVAKVLDAVGAIRSPAHDYANNQEGFDLNHYPIKVAFDYAWEQLANSLYTTVTFPQEMCEKYLNSIYGCEVSKEPVFKFYADLLYIRKNLAVLEHKNNLPSNQEEFICKINNTFENIVLPYKISQFETYKKDILAWINDGHDHKKYTDAKQQLGFIRGGLKGRIKAEEVSQKDKYGKIKSYYENPYTKLTNEFKQISSTYGKTFAELRDKFKEKNEITKITHFGIIIEDKNRDRYLLASELKHEQINHVSTILNKLDKSSEFITYQVKSLTSKTLIKLIKNHTTKKGAISPYADFHTSKTGFNKNEIEKNWDNYKREQVLVEYVKDCLTDSTMAKNQNWAEFGWNFEKCNSYEDIEHEIDQKSYLLQSDTISKQSIASLVEGGCLLLPIINQDITSKERKDKNQFSKDWNHIFEGSKEFRLHPEFAVSYRTPIEGYPVQKRYGRLQFVCAFNAHIVPQNGEFINLKKQIENFNDEDVQKRNVTEFNKKVNHALSDKEYVVIGIDRGLKQLATLCVLDKRGKILGDFEIYKKEFVRAEKRSESHWEHTQAETRHILDLSNLRVETTIEGKKVLVDQSLTLVKKNRDTPDEEATEENKQKIKLKQLSYIRKLQHKMQTNEQDVLDLINNEPSDEEFKKRIEGLISSFGEGQKYADLPINTMREMISDLQGVIARGNNQTEKNKIIELDAADNLKQGIVANMIGIVNYIFAKYSYKAYISLEDLSRAYGGAKSGYDGRYLPSTSQDEDVDFKEQQNQMLAGLGTYQFFEMQLLKKLQKIQSDNTVLRFVPAFRSADNYRNILRLEETKYKSKPFGVVHFIDPKFTSKKCPVCSKTNVYRDKDDILVCKECGFRSDSQLKERENNIHYIHNGDDNGAYHIALKSVENLIQMK

SEQ ID NO: 22 - protein, 1276 aa, unknown
  Metagenome-derived sequence
MKSFENSCQISKTLRFGATLKEDKKKCKSHEELQEFVDISYKTMKSSATIAESLNEIELVKKCERCYSEIIKFHEAWGQIYCRTDQIAVYKDFYRQLARKARFDVGDQNSQLITLSSLSSKHNVYQGLKRSQHITNYWKDNIARQKSFLKDFSQQLHQYKRALENSDKAHTKPNLINFNKTFSILANLVNEIVIPLSNGAISFPNISKLEDGEESRHLIEFALNDYSDLVGSIGELKDAIATNGGYTPFAKVTLNHYTAEQKPHVFKNDIDAKIRELKLIELVEKLKNKTSKQIEEYFSKFDKFKIYDDRNQSVIIRTQCFKYKPIPFLVKHELAKYIAEDEDAVLKVLDAIGATRSPAHDYAHNEDVFDLKHYPIKVAFDYAWEQLANGVYTTVSFPEEKCREYLNAIYGCEVTKEPVFKFYADLLYIRKNLAVLEHKNNLPSNPEEFICKIENTFEKIVLPYKIKEFETYKKAILTWINDGRGHEKYTDSKRELGLIRGGLKGRIGAQKMFRKNKKGELIPYYENPYTKLTNEFKNISSSYGKTFAELRDKFKEKSEITKITHFGIIIEDNNKDRYLLANGLQHDNTDQSNTQVEAILGKLNTSLEFTTYQVKSLTSKILIKLIKNHTTSPNAKSPYADFHTSKIHVDWTKIKKEWDTYKSNHSLLQYVKDCLTNSTMAKNQNWAEFGWDLESCNSYEAIEHEIDQKSYILQKHTISKASIKSLVENGCLLLPIVNQDITSQGRKDKNQFSKDWKQIFEDSKEYRLHPEFAVSYRTPIKDYPKDKRYGRLQFICAFNCEIIPQNGEFINLKKQIENFNDEDIQKNNVAEFNNKVNEALLGKEYVVIGIDRGLKQLATLCVLNKRGKILGDFEIYKKEFVRTENRSKNYWKHTLAETRHILDLSNLRVETTVEDNKVLVDQSLTLVKKNRDTPDEKATEENRQKIKLKQLSYIRKLQYAMQTNEQAVLDLLKDNSDDEEFKKRVEGVISPFGEGQEYADLPIDTMRAMIQDLQGVIAKGNKQTEKNKIIELDAADSLKQGVVANMIGVVNFILAKFNYEAYVSLEDLSRAYNVAKSGYDGRYLPSTSQDPDMDFKEQQNQMLAGLGTYQFFEIQLLKKLQKIQSNNTVLRFVPAFRSADNYRNIIKLNPKYDNTEYVHKPFGIVHFIDPKDTSSKCPVCGKTGKKNVDRNEKKNNILLCKACGFRTVWELKQPENIKSEGYCFSEDEIQKTIKNNQKQMEIKKLSDKNIHYIHNGDDNGAYHIALKSVENLKHKE

SEQ ID NO: 23 - protein, 1286 aa, unknown
  Metagenome-derived sequence
MVEFCTGVKGMKSFENSCQISKTLRFGATLKEDKKKCKSHEELQEFVDISYKTMKSSATIAESLNEIELVKKCERCYSEIIKFHEAWGQIYCRTDQIAVYKDFYRQLARKARFDVGDQNSQLITLSSLSSKHNVYQGLKRSQHITNYWKDNIARQKSFLKDFSQQLHQYKRALENSDKAHTKPNLINFNKTFSILANLVNEIVIPLSNGAISFPNISKLEDGEESRHLIEFALNDYSDLVGSIGELKDAIATNGGYTPFAKVTLNHYTAEQKPHVFKNDIDAKIRELKLIELVEKLKNKTSKQIEEYFSKFDKFKIYDDRNQSVIIRTQCFKYKPIPFLVKHELAKYIAEDEDAVLKVLDAIGATRSPAHDYAHNEDVFDLKHYPIKVAFDYAWEQLANGVYTTVSFPEEKCREYLNAIYGCEVTKEPVFKFYADLLYIRKNLAVLEHKNNLPSNPEEFICKIENTFEKIVLPYKIKEFETYKKAILTWINDGRGHEKYTDSKRELGLIRGGLKGRIGAQKMFRKNKKGELIPYYENPYTKLTNEFKNISSSYGKTFAELRDKFKEKSEITKITHFGIIIEDNNKDRYLLANGLQHDNTDQSNTQVEAILGKLNTSLEFTTYQVKSLTSKILIKLIKNHTTSPNAKSPYADFHTSKIHVDWTKIKKEWDTYKSNHSLLQYVKDCLTNSTMAKNQNWAEFGWDLESCNSYEAIEHEIDQKSYILQKHTISKASIKSLVENGCLLLPIVNQDITSQGRKDKNQFSKDWKQIFEDSKEYRLHPEFAVSYRTPIKDYPKDKRYGRLQFICAFNCEIIPQNGEFINLKKQIENFNDEDIQKNNVAEFNNKVNEALLGKEYVVIGIDRGLKQLATLCVLNKRGKILGDFEIYKKEFVRTENRSKNYWKHTLAETRHILDLSNLRVETTVEDNKVLVDQSLTLVKKNRDTPDEKATEENRQKIKLKQLSYIRKLQYAMQTNEQAVLDLLKDNSDDEEFKKRVEGVISPFGEGQEYADLPIDTMRAMIQDLQGVIAKGNKQTEKNKIIELDAADSLKQGVVANMIGVVNFILAKFNYEAYVSLEDLSRAYNVAKSGYDGRYLPSTSQDPDMDFKEQQNQMLAGLGTYQFFEIQLLKKLQKIQSNNTVLRFVPAFRSADNYRNIIKLNPKYDNTEYVHKPFGIVHFIDPKDTSSKCPVCGKTGKKNVDRNEKKNNILLCKACAFRTVWEFKQPENIKNEKHCFSEDGIKKTAEDNNKKIKEKNLSDKNLHYIHNGDDNGAYHIALKSVENLKHKK

SEQ ID NO: 24 - protein, 1255 aa, unknown
  Metagenome-derived sequence
MSLAAFTNQYQLSKTLRFGFTQKEKVRKENFDGSIYQSHAALRELTIESERLIKGKLKSNTDTALPLEKIRACIEEIKRYTDTWSKIFTRDDQLALSKEYYRVMARKARFDAFWKNYRDVKQPQSQIVRLSSLKSKYNGKERKAYLVDYWAGNLQTVKQRLVDFEPAIRQFESALKDNRTDRKLNEVDFRKMFLSICKLVNETLVPLCNSSLCVPDLEKLLDNEASQELRDFVMMDIFQLQEQIEALKIYFGENGGYVPYGRTTLNKYTALQKPHAFDEEIEAILVKLKLSDVINNLIKQDDVSDYFENVKDKIGQLSNSSMSVIECVQLFKYKPIPVSVRYSLVEYFHRKLGIDKDELGTLLDTIGKPKSPAKDYADLQDKGDFNLYKYPLKVAFDFTWESLAKAQYHEGLNFPEVQCQKFLENIFFVNTSCEAFKTYALLLHLRGLLAKLDHEEPNDREAIIDKAISLMNEDAFPKVPLRGTKGDSANQAILSWLQLSKEEQVYKKEKKDQSYNQYEKAKNKIGLLRGEQKNKIGKYREVTEQFKDLASNFGKLFGALREKFQAKNELNKITHYGTIIEDNNQDRYVLLYPLSEGIIDLDKLFVHEESGTLTSYYVKSLTSKTLNKLIKNKGGFKDFHMDGQQPDWERVKKRWSVYKDDKAFLKYVKRCLNESEMAKAQNWGEFGWDFSSCDSFEEIEREVDKKGYSFKNDRKLSEDTVKRLVKEEKCLLLPIINQDIIVEETKLRNQFSKDWVNIFDADCTEYRLHPEFGMSYRMPTPNYPKPEQKRYSRFQMIGYFQCEIVPIKTEYLSKKEQIEIFNDADAQKEAVEKFNEIVNGSVKPNDYVVIGIDRGLKQLATLCVLNKDGAIQGGFEIYTRSFNADKKQWEHRFMDNRDILDLSNLRVETTVDGKKVLVDLSSIKVKDQRGNYTQDNQQKVKLKQLAYIRKLQYQMQVNPEKVKAFAAQHRTPQDIKDHMKELITPYKEGSHFADLPLDRIKYMLEAFCAFHTENDQTSLRELIELDAADNLKSGIVGNIVGVIAFLLKRFSYNAYISIENLTRAFYNQRDGLSEKEIPRDHDFMDQENLVLAGLGTYHYLEVQLLRKLFRIQCDAGIINLVPAFRSNDNYETTRKLSKKQGVEYVCKPFGIVHFVDPMYTSKKCPACGGTTVQRGSFKDDITCQNPLCGYGTSLDISEKIQKLISANKAGQNIHLISNGDENGAYHIALKTLKNLFGNIQNANNERRYVKSFRSK

SEQ ID NO: 25 - protein, 1255 aa, unknown
  Metagenome-derived sequence
MNHIYNNYQVSKTLRFGLTQKQKIRRPGYTGELYESHKVLKELVKISEEKVKNLIVPAKNEELLSSLDSVKWTLTEIREFLDQWRYIYNKSNQIALDKSYYLILSKKLGFNDEKKSRVIKMIEIKDDIKEKIINYWAFNLNESNQKLLMVNEMVNTQLKALEINRTDHKINEIELRKALQSLFNTVLDILKPLVYREISFINLEKIEKDSKNSLLEKFATDFQRKIDLLEKIRSLKTHFSENGGNVSFCRATFNPKTAIKNPKSNDNSILKEIKKLGIKDILENNENVFYFEKKLAEITAKEKLEYIIKDSESFLIRSLLFKYISIPAFLHHGIATELAPIISKEKNDLINFMISIGQIKSPAKDYADIPNKNDFNVNAYPIKVAFDYAWETVAKSQYHHDINAPVSMCKTFLDENFENCTKTKYFTLYSDLLELHTLLSTLDYGNPSMEDSIIDKANKIIAKIDNKEHKTKDKDLDKDIDKYKETIKNRLNHKNFNDKQRYSDAKKELSQFRGKLKNENDIYRKLTESYKKIAMNTGKIFAEMRDKISNASEQNKISHHALIIEDHNKDRYLFLQEFTTDKEKQIESICNDQAGQYIVYWVNSITSKSISKMLSKKRIEKLKQKKIINNSIKTSILSDAEKEARDIKEWVSFIKEKGWDIDFNLDLQNKNLEEIKKEVDAKAYKLKETLISQKTLSNLVKEGNCLLFPIINKDLVKKVKTEKNQFTKDWNSIFKKDNLWRLTPEFRVSYRQATPGYPTSDIGTKRYSRFQMTAHFLCDFLPQGTKYISNREQIENYKSSEKQKEAVEIFHQQIENDNNNVISTQSLNHLARHFGSKNIKKKHNTIEKKFYVFGIDRGQKELATLCIIDQDKKIEGPFKIYTRSFNTKTKQWEHQFYEERYILDISNLRVETSISIDGKPDQQKILVDLSYYKEGEKFIKLPKMQVKLQQLAYIRKLQYQMQRNPETVLDWSYKNTDDKSILENFVDKPNGEKGLVSFYGAAVIELKDTLPLSEIKDMLERFKELKGKEKNGEDVSQQLNELTQLKSVDHSKYGVVANMVGVIAHLLERYDYKAYISLEDLTKPYSAIDGITGQKTDAKSISGKQQDVEKYAGLGLYNFFEIQLLKKLFRIQKDSQNTLHLVPAFRATKNYENLIAGEDKVKNRFGIVYFVDPKSTSIMCPSCGKTNNSSNKEKRVVRDKKNGNDIIYCEFCGFDTRNDYKENPLKFIKSGDDNAAYIISTHTAKKAYELAKSIL

SEQ ID NO: 26 - protein, 1029 aa, unknown
  Metagenome-derived sequence
MRKMFLSLANIVCEVLVPLCNGSICFPDIEKMSDKDENKYLREFAVDYKTKIDLFDSISELRKYFEENGGNVPFCRATLNPKTKIKNPSSTDNSIEAEIEKIGMEKYLQTTDEIITAINKIKQMQDSKLPLIKRALLFKYKTIPAVVQFDLAKSIGKKLNKEEQELRTIIRTIGQTASPAKDYADLQHKKEFNINQYPLKPAFDYAWESLAKAEYHNDIEFPNQICKQFLKDIFNVDTETDSYFKLYAQFLYLRELLATLEHSQPTNPEKIVKIIEELLEKINAWKEIDDKNSEKYKTAISNWLKTFNKEDNNFKNAKQKIGLFRGGLKKKAGDKSRWEYLRKPDEKEAPKLTAYNALTQIYKDIATNLGRNLADMRDKITNESELNKISHYAAIIEDKNGDKYVLLKKSDKDEEFALPCEKDAEYKTYIVNSITSSAIAKMIRKKRAADLAKNIRLKSEELNDEQKEAKNLKDWIELIKKQQYDFEFNLNLNNKNFEQIKKEIDAKCYQLQKGNISKQTLEKLINEQKEWLLLPIINQDLAKRDKSTTNQFSKDWQKIFSDKRCGYRLTPEFRISYRKPTPNYPQSQIGDKRYSRFQMIAHFLCDYIPQGNLEYKSTRQQIEIFKDYEKQEESVRNFTYKIYANNDYLIFGIDRGLKQLATLCVLNKEGKIYGGFDIYTRSFNKDKKQWEHSLSEKRNILDLSDLRVEKTITGEKVLVDLNSIKVKGNQDNQQKIKLKELAYIRKLQFKMQTEHGTVINFINKYRTPEEIQKNIHELITPYKEGEHYADLPTEKICNMLQKFKEFSDKNDGKSKRELIELDSAGELKNGIVANMVGVVAYLLEKYKYNVYISLEDLTRAYRRQTDGLDGRELFSSNDDKSVDFKDQENTALAGLGTYHFFEIQLLRKLFRIQQEDGNILHLVPAFRSVDDYEKIIRRDKKIDGNEYVDYPFGIVRFVDPKNTSKRCPLCSSININRHKNIIKCQQKACGFKTPWDKTNDKNIQYIQNGDENGAYHIAKKTLDNLNNKK

SEQ ID NO: 27 - protein, 1276 aa, unknown
  Metagenome-derived sequence
MEKIKNKYQVSKTLRFGLTQKEKRRKKGFVGEVYESHTELKDLTDFSVKKIRAEIKQGGNSGIPIEKIRQCLIVIRRYMNFWENIYYRCDQLSLDKDFYKKLSKKIGFEGFWHEENRKTDHRIKKPQARTIQLSELNKKDDHYKERKDYIVEFWESNINKAAERFKETESVFEKFEIAINANRDDNRPNEVEMRKMFLSLANIIYETLVPLCNGSISFPNIEKMQNNEENNNLRKFAADDEFRAGLLTQIEELKAYFEENGGNVHYCRATLNPKTVIKNPNSTDSSIADEVEKTGIERYLQNKQEIKNKIEKIKDKNLPLIERALLFKYKTVPAGVQFDLAKFLSVKLGKTEQELRTIIRCIGQIQSPAEDYAKSEDKKGFHLEQYPLKSAFDFAWESLAKAIYHKNVDFPQQQCKVFLEKNFDIKIDSNANFKLYAQLLYLRENLATLEHSKPTDPDTFEKNIRKLLDEINWSTIDKEKGSVYKNAISDWLKNKKAKDEKFGKVKQSIGLSRGRLKNKIKKFDDLTKDYKDIATQLGNAFAAMRDKITNAAELNKISHYATIIEDKNGDRYILLQKVTENEKPVGENWNKNGELKTYLVNSVTSAAISKMIRKIRTDELRKNEKMQSSITKLNEKQKEEKNINDWKNFIEEKRWDLEFKLDLKSKNFEQIKKEIDTKCYLFNTGYASQADIKQLVKEKDALLLPIINQDLASKDKIVRNQFSKDWQMIFSDNSQGYRLTPEFRISYRQPTSNYPQPEEKRYSRFQMIAHFLIDYIPQNNQYISTREQVELFKDETKQREAIEEFHKQLTPKTEAEQKAESLSALAAKFNNPNNKKQKNNASENKPDEKFYVFGIDRGQNELATLCVINQDKKIIGDFEIYIRKFNSEKKQWEHLKLENRHILDLSNLRVETTIVIDGKPEKKRVLVDLSEIKVKDKNGEYKNPDKMQTKMRHLAYIRKVQFQIQNNPEGVLDFLKKFKTKNETIYNLVDKENGEKGLISFYGAGNTNEDLPKDDIWKILQKFQELKNKTGDDNVKKEIKELIELEPVDNLKNGVVANMVGVIAYLLEKFDYQVYIALEDLTKPFNEDIKDGTTGVKGNYKGEGKRADVEKYAGLGLYNFFEMQLLKKLFRIQQENDNVLHLVPAFRAVKNYENLIAGKGKIKNQFGIVYFVDANSTSKTCPVCSSIPDKNNSNNKNAKGKKIINKKGNESVIWVERDKSNGNDIIRCYACGFDTTKNYSENPLKYIKSGDDNAAFIISTLGIKAYELAKTLVANK

SEQ ID NO: 28 - protein, 1290 aa, unknown
  Metagenome-derived sequence
MNSIKNEYQLSKTLRFGLTKKKKLLKDDCNEIIYESHTELKELVLISEKKIMESVYINQKAKLDLSVDQIDTCLSSIKNFIDSWKGIYPRADQIAIDKDYYKILCKKITFDGFWIDEKTKTKKPQSRTILLSELSKKDASGKERKQHILDYWKNNIFSAIEKYEVVSRELKQFQKALKIQRTDNKPNEVELRKLFLSLANIILDILKPLVNGQICFPKIEKLDISKTDNKNLIDFATNHKFQSDLLNEIAELQHYFEENGSNVPFCRASLNPKTIIKSKLSTDNNIDKEIKQLGLDRILNEYLSAPYFDNSIIHLSAKEKLNKIEDKKENYITRGLLFKYKPIQIMLHHEIAKTLSKEIGKSEENIIEFLGNIGQIKSPAKDYEVSKEDFNINNYPLKVAFDFAWENVARNLYHTDTHAPIDECRKFLADNFDIKIEDNNLKLYANLLELNALLSTLKYGKPKDETSIKQNIKDLLNKISWNEIGKSGQKNKTNIENWLNNKDKIDNQNGIENAKKQIGLFRGSLKNKVPKYYKLTETYKDISMKMGKIFATMRDKITDEAELNKVSHYAMIVEDDNKDKYILLQEFTDKKEECIYSKTQTHNSDFTTYSVNSITSSAIAKMIRKVKAEELRKNQYNKDTFSIEETKEEKENRIIKEWKQFLKDKQWDYEFNLDTKNKNFEELKKEIDSKCYKLNISYIDKKTITDLVENKNCLLLPIINQDLSKEEKTQNNQFTKDWDAIFSQNTPWRLTPEFRISYRKPTPNYPISDKGDKRYSRFQMIGHFLCDYIPQSNTYISNREQIANYKDNEKQEQAVQCFHDKLLGKTEKEAKNEKLIALQAKFGSISRTNITQEKKKEKFYVFGIDRGQKELATLCVIDQDKKIIDDFDIYTRSFNSKTKQWDHTFLEKRAIMDLSNLRVETTISIDGKTEKKKVLVDLSKVKVKDKQGHYSKPDKMQIKMQQLAYIRKLQFQIQTNPDVVLAWYSDNNTQDLILENFVRKDDNDNKGLVSFYGAAVEELKDTLPIEEILNMLKQFKELKEKEKAGENVKYEIDRLIQLEPVDNLKTGVVANMVGVIAFLLEKFNYQVYISLEDLSQPFDNKINGGITGVPIKTNKESGRMADVEKYAGLGLYNFFEMQLLKKLFRIQQKSTTILHLVPAFRAQKNYDHVTVGQDNIKGQFGIVFFVNANATSKTCPICGANNSEKPDKNKYPNAHKELAKDGKEVWIERDKSNGNDIIRCFVCGFDTTKTYEDNPAKFIKSGDDNAAYLISVSAIKAYELATILAIEKYK

SEQ ID NO: 29 - protein, 1297 aa, unknown
  Metagenome-derived sequence
MKSIVNNYQISKTLRFGLTQKTKIQKEGYNGEIYVSHRELCDLVKISEERIKKSVSASDKSNLELSIDIIDTCLKQIGVFLSDWQQVYYRKDQVALDKDYYKILCKKIEFDGFWKDDRGQRMPNSRIINISELDKRDSLGVERLHYILNYWKDNLVSASQKYSAVEEKIKRFKSAIKINRTDNKPDEVELRKMFLSLANIVCDTLQPLCYGQISFPKINKLDDSRTDNKKLIKFATEYKSKNDLLTSIAEQKKYFEENGGNVPFCRATLNPKTAIKDPNSTDNSIKGEIAQLGLDSILKSFKSYLFFENSLENMSAKEKIDLMKSDGASIIKKGLMFKYKPIPVIVHREVAQELSEDLNKTEESLSDFLRGIGQAKSPAKDYEELTDKNEFNIEAYPIKVAFDFAWESLAKAKYHSEIDLPVDSCKKFLKTFDVTPDDANFLLYAQLQELNALISTLEYGYPSDEQSIVKKIKALSNEIQWEKVSDRNGQEYKRSISDWADGKRDSDGFKIAKQNIGLFRGGLRNKIDKYYSLTQIYKKTVMDEGKIFAIMRDKIIGAAEQNKVTYYAAIIEDNTGDKYVLLQELPLNGQDRIYDKMTRDGDGYVCCFVNSITSRTIAKQLRKKRMAELKKNKAWGAYNDNVSNTQQPVLSDEEKEERNIREWKSFISEKRWDCEFNLNFKGKNFEEIKKEIDAKGYELENRRLSREALDELVKNNKCLLLPIVNQDIIKENKTESNQFTKDWNSIFDDNSPWRLTPEFRVSYRKPTPDYPVSSKGDKRYSRFQMIAHFLCDYIPNSDSYVSVREQIENYKDDKKQETAVKDFHNRLLGKTEEQKIIDRLGAFQGWGNVIIKKTKPEKQEGSKEKFFVFGIDRGQNELATLCVIDQDKKIQGGFKIYTRSFNSEKKQWEHKFLEERNILDLSNLRVETTIVIDGQEKKEKVLVDLSEVKVKDHFGNYVKPNKMQVKLQRLAYIRKLQFQMQTNPERVLEWYSHNQTNDLIINNFVDKQNGEKGLVPFFGAAVAELKDTLPIDRISEMLKQFVELKNLEKQGEEVKSKIDQLIELEPADNLKSGVVANMVGVIAFLLEKYSYQVYISLEDLSKPFENQIVLGISGVPIGINKGMAGRSVNVEKFAGLGLYNFFEIQLLKKLFRIQRDSCHILHLVPAFRAMKNYDNVAVGKGKIKNQFGIVFFVDAAATSKTCPCCGANNSKKFEPDFRKFPNAKKFETPDKKSVWLERDKSDGKDIIRCHVCGFDTSKEYDDNPRKYIKSGDDNAAYLISAEGVKAYELATTLVDNK

SEQ ID NO: 30 - protein, 1342 aa, unknown
  Metagenome-derived sequence
MLTKFANLYELTKTVRFGLTPKNSYKKVSDFFELTEKSLESVQAEIVEREKEKINITSTEESIKKIRAYVDELKKQSAQWKTIYQREDMIAVTKEYYKKLEKEAGFDGFWEDRGKKQPQTSEIMLSALSKEYNNKPRREYIITYWALLLQKTEQLNSYFEPLLEKYEESLSRKEQAHLKPNLVDFRKQFLSLLNVSNKWLMPVINQSIVFPKIHNASKGEQNRKVKDFISEEGRQKRIQLQSIGRSLRDFFEANGSRVPFGKATLNYFTARQKPNRFDSEIDALMLDLEIEEIVRKVKDLNGEELKNYFKYQTYATGDKLDAFLGHSYMTLIEKIQLFKPKPIPASVRFSLAERLSKKMNLPMEKVTAIFDEIGNPIDIAREYEQALDQKNFDLNKYPINIAFDYAWESCASLIKGRISEGDFPKAQCLAILKKFNADGDDFKLYANLRYIRDELAPIEHNNPSADIEKELVYNIQKTIGIIYSSMPSEYQKYLDIILKWVEMPKIERNSSDSNFIFAKQKIGLLRGGLKNKINKHAEITNKFKNLSMAFGRSCSDLRDKLREEHELSKIKYYSVLIEDSKKNRHLLMLPLETGDQKMSAVEIENRLDILENKFVEDAPSANAYIASKVSSFTSKALVKMLKNPKGSEDFHIGSEKYKLHDYNNKIKKEWKIYQDDSKFLSYAKKCLSESKMAMNQHWEKFGWNFEGCKTYADLEKEVDIKGYSLEKKYISFENTEMLVYEQGCLLFPIVNQDYASEVCQNIFTGNKNAFTIEIEKGLQEQDGYLIHPEFTIFYQKPTEDYKKSNRYGRFQLSANFSLEVKKISDNFKTKKEKLKNIRDKDSFQKDVQIFNESINAQLRINEDVYFYGIDRGINELATLCLLNNKNKIQDFIVFKKEKKKRNSENHLREAGDFYTYVDFEKQNILDLTNIKVETWNMRDEIHPNSNFLKQAFKKIEADPEMKMIATQLGYGINEKKQCTILVEYPSDRSNTLKLRMNHFQRALQFATSHSEKRDIVGGIAERNFEGTDLENPSDEVKKQIIQDLFGLGSDFLIDEKKAGVINELQTKKFRFEKIYSRNQQLFLEMFEPLIQQLIEWYQHKNDPDYEKTGKAKYEEMEDLDTLKRGVTANMVGVFSFLMQKFPGVIVLENIAKEKLEKPVQSKLDEHTREVESHQEAEHHRWAGVELYRYMEKKLVQKFSNWRQPTGEIFNLTPPFANLESLNKQTMTINSERIENMFQFGIFCYTPAEYTTKTCPCCNKYHIRNRKKGNTFDSIICKNEHCGFDTRYNEPLHESFNPARNVEIALRLNPEFSEALPKIRSGDQSAAFNIAKKGLIIMENKLC

SEQ ID NO: 31 - protein, 1402 aa, unknown
  Metagenome-derived sequence
MGKKQAVYNKFDEYLNQKNNSGKSNSNQIFNNNRQRRDKQAKNPKNNHAGKGDDAKPQIIKIPKSAIFEQYKTIRFTLSPNETKKNKVVASELESLVGVSMEMVQSQIQEKSKSLEIKDQETAIKKINEILGSLKNFTSSWLTFSERTDTIKLSEEYYRFVARKARFNSFEQYKDKYGKEKTTPQIKSGFIPLNQKSEYQGIERSEYVIKYWQNLANNIVNLHSQLEAPVDKYITALEKQDKAHTKVNLIQLKKTFLSFSNLILEYLEPLTNNKILIEKIDKLPDSEENTKLKEFFSNQNINLIRQDLQSLKQVIDYFNQNGALVSLGKVSLNYHTAVKKPDIVKSEIETIINELELETFIKKYIQCDDQELFKKFQFDIADKKQVFLCNKNDLTKIELAQLFKPRPIPFGVIHEISEYFEKKDFDYNNVQNILMNTGQSVNIAGDWTNTKLEDRENFDLNKYPLKSAFDYAWEYTARNKVGLIGNNDFAKKQSEKLLTDFDVKTSDNNFESYANLLFIGDKLAVLEHSAHEIKDKKELENIMILISQKIENVKNPFHQNSEKDRYEKFENNCETISSSLNSSHTLKSNKNFQKAKQNLGLVRGGLKNKGIYYKLTQQFGINKTIDNKLSLASFLGLKFADLNKKFKEKYENNKIGYYGVIVEENINKYLLLKALENEDTREIIENDKILKSEKFENALTVKKVTSLTSNSLKKIRINKKAYPDFHLEKIDEEKTSKEDNKALKESKRANYIKRCLLKSKMSQEQNWNQKFNWENDLNECQTYEQIEKVLDLKGYKLETKHISKNDLENLVTEQDCLLLPIINQDYQSEIKQGEFVGNKNQFTVDFENVFVNKPIENKQDKKTYNYRIHPEFSLFYQLPTIKPETGQTEQDLQKEHHAKTLNRNSRFQIIGNFGIEIKPEITEFSQFGNFINRKGKNDLTRDKQSYAEFVQGFNQKISSDFEQKDSNRQWIYGFDRGINELATLCVLHKNSKQIDDFVVFKKEKEKEKKLGWIGEIIEEKKKSGKELEKKDKFVFRFVKHDESKNQKGFELQHILDLTNIKVETWHFGFKDKDGNDHPNDKYLKTALSKIKENSELFEIAKKLGYFDNFSEGKRGENIKILVQYPENESNVIKLRMNHFQRVLSFAISQNRDGVANSIEEVFESDVEAEQVKKLFDNGILDNTKIKIDIDKHINLFKPLLDQIKEWNENKDKPNYLDEFKKKYEEIEDLDTLKKGIVANMVGVTGFLMEKLPGVLVLEDTYKYDPQGFRINSLTKRDENADTFGHSEHLTWAGTETYRYFEKMLVKKFVKQRLVPPFADLESLNTQKTKLGGNEDENNKQFGIMFYVDAGFTSKTCPCCGFKPDFKNENLKNLLEKTTSIQKINHNYCLSDCKDNILFELKN

SEQ ID NO: 32 - protein, 1189 aa, unknown
  Metagenome-derived sequence
MNKYQKTSAIRLALKVNENFESNLKNAIETYKKNTADPEELCSRLIEILKKVIELFDKEEVKKDEYKSLLYKLKLSPHIIGSEFGLFISGSGRADSLRLNSRKLKGFFSTLFKKTNESLISLEKQLTEKNTPNFSPKNTRKILDEIFKSSLDIEHELLKRKAPTLKEAIDLIQKQNYHSDDLVPQEFAELQKTLAKLSKILDKLKESLSIFHEVITASLNEHTLTRQTTLEEREKKIKEEEDKLTQKVWAGDLKDNLNYISRFVAGHKNAFKATMNYLGKSINDNFITVEEAGKWTKKFYKIIAEGYKTEIKGLKKEVDELAKQIIGSDLEEFVKSNKDKIRVNKIKIDQNIKNSAINIFKKYLPDLPSNIKDDFLIKFLRNRILKVLIDNLIGKENKKYQIKPERKNAANELAKIINNKSEDNLEESQIIEILLNKKQKAAHTAGTNYTHIINKSNFIQNKNKVAKYIGNIKAKIATYKKDKKNLSHLALLVLDKKDENFDLLLVPKKFKKEFLYTLERLNEPVGDKKIYKIESLTLRSAKTLISANLGELIPFFKAGKWHTIFAFKAFLIKYLLDAGSINSTKAAALKCKVVEEFKKLIEYASLGGQEQKEADKFIGVVDKLICNSKNRFSHIELSHSFAEKSISIVEKDYSDVADFKKDFTELYNFVLVANVNSGKLIKLIQEAQKKFNNPNNLQFSNLFLLTSSGVKGNYRQNRRYLKEEKELLQSIKKQDFESIRLNPEIKIFLELGLDTQSSEELKELASKTRRGKDRLSIVFTITKNAKEEEDFLPAFAQDEDLETRIFELNKVVNENLKNAVRIGLDRGESELVSAVFGKIEEGRVKFQKIQVYYIDYKKIFDENQEGAVKIFLNPSLLFDENKPYTKYTKHLIEKEISQENLSYAKVIKDKVIMNADISSVVNQLMYITFADLNIEQVENLIVAEPGFVDKTKTIQLKFNGINSKKFGINASYLYLNGNITEDVKENFISAFLIKVLEHKLKIFNERVLPLIKIGQISIDTLPKNTKEALASNIAGVIAYLIEKEFNNQAIIHLEDLSAQFKDDHSKNGRAISREFEWALYRRLGKIENDFDLVPPKLGQTIYFAEIKKLKQAGIIKYLPTGKSSSFCPECLQFNFTNKDGIKKYIKITQKCQFCDFEIGNNELGIDSPDTLAAYNLIYPEFERRAINNN

SEQ ID NO: 33 - protein, 1166 aa, unknown
  Metagenome-derived sequence
MENNNMFNNLKNLYELRKTIRFELEPYIIKRNLIPDNNVNENLLKEFYNSYKDFINLLKKNFFNDKNIIGEEDKDIENKPFANLFKKAGINIEGNNQSGNQDIDKDIYDNYEWYNTIQFKYKWLEEVFLNEWIDNKEKIKYKNGEKKQKNYITFGDLGENNFVKKFFIKFFKDTDSNLKSLEQYLNNGLEDQTRRSDILFLIQSINSRDYLGKLYILFKKDNIDHKNDYNIIKEMKESILQLEKLIKQLLNKLKPSQAFGLPIEHISLNYYSVNKTPKEIDDEIKNELNKKNNIDKKYIWTFEDKDNLKSMFFKSTDKELEKELEKELNQEMSLKELKQKIKLFKAKQKAGFLELLQQKTPFKNFTKPFDFKFMGESFEKFNLVLFSKINEDTYNKMLKLTEEIEKENNKAEIKKLKLKRGKFFQRELKQFKGFCDAYKKIAQKYGQANAKIKSLKSQKVDAEKLRGWGFLSQKNNDYFINTFDIENSKNVFTKEIKNLKENGKDVVIYILSSLTLRALDKLCFKKDSSFIKELINNIDDKFINTNNKYKKLKSKKQLLEELEEGELINFYIEILEKQKTLNIKYRTEKSLDILKSSKNLEEFEINLKLETYHFISKKISEETYNRILKEYKGNSYKITSYDIKRGKQTKKYTTWWFDFWKKENKYNKYITRINPEMTISFKEKDKNFIEDNPDKKRNRKFKNRFILATNFSFYADKYYIDSAFINEEKRKNSIDSFNKLFNQNNKLKYIYGLDKGTKELITLGIYEIKGEELKPVNISVKIPLYKITKKGFKYFEEIENKNGEKKKRYLAKNVSYFIKDLENKELFEKLEINSCLGDLTYAKLIKGNIILNADIFTTLNFYKITAKRFLNDAITKGKIEGEKVFYIEKNKNFYYNYENRSEIEKKVIIYRKEEFDYLPYNEQYYNSLIEEIENELNSYIKKIQSSLNNSKKHHDNEDISIQKINNYKNAISANIVGIIIKLQEHFNGYICFETLDEGQIQKKGLKTFIGNIINEKIYNRLQLNLEVPPILKKFRTDVGNKKIIQHGKVIYINESNTSKACPICNKTLLEVDKNGILKEKDGKDDNKIYKLYGHLKRKNENKMRHLSDNEKFQPGKIEINGKIEKICDYNMEKNNYGLDFIKSGDDLATYNIAKKALEYLNSKTNN

SEQ ID NO: 34 - protein, 1119 aa, Gracilibacteria
MLESFKDLYEVRKNASFRLEPQENAATNENLYNQDVDLSEILSKYKNFVYDLKNLLYIEGEKVTEKEKDNDLSVDKLDSSNVVHINHKYLSKYFSKEFFENYDRIIKRNKHGAKTKNWTTIGNNDFLEVFFRSFFNNAFENINKLQELIDTKENEQKRKADIAFEIRRLLSRNHLGKIFPLFKGGYLTHKNDIKTIPELTNQAKELKELLDNAKIYFLEDSNFGVQVEHISLNYYTRNKTQKEYDELIKGKKKLLDSPYNKDISELYGIDRNLPIKQLYEEMKMFKARQKSAFFQQLQSKTPFKKFKEPFTFTDNEGIKHKEFRTELFFDVEEEYYNKMLDLTKKIEKSGSNKFKKERGDFLLFQDKGTKSFKGWSGFCSEYKKVAMEYGKRKAESLSLEREKILAEQERGWGVFSKVNNEFYINTFPIDKVKDAYQSLSKKKNDGELSYFILSSITLRALNKLCFSKDSKFINKEILIKLDNEFLKEKEYNNKTKEIVLRKKSDLTELKLIKLYYNVLELQNSLRISYKNSDSFDKLKSSKNLEEFELNLKNETYKLEEFKTTEDEFNKILKSNEGKSYKIINKEKGNFEKWWKNFWNSSKDGEIRINPELNISLRKGNEDYNDKISFHRKKDDVYLLNVNFSHFANRSYIDSSFIEDDKRKENLKKFNDLYNKNIKLNYFYGLDKGTNELITLGLFKKEGGKIKSVNISKEIPVYRITRKGLLHSKVTFKKAPKEGQNPKTIHTLYKNPSLFIDELDNEEIFEKVNIESCLGNLNSAKLIKGNIILNGDILTNLNLHKLSAKRKLYIAITEGKTIIKNIGFDEKEQENGAFFYEYINKGKTEKEPVFYINEEFLTIVSLDELKNELNEYIKYIKNEPNEYKKYMGNNALDTDISMLAINKIKNALCANIIGIIMKLQEKFPGYVCFESLSNDNNNRDMEKEHSFLGNLINDKLYSKLNINASVPPILKKFRSELKNSYYQYGQVIYVNEDSTSSACPVCNDKFIKGINKKGNLEEYKKNKLYGHLTESESSMHHLTDDEYNKKYDNNDKFREKHTNDKGKKKDNIYRSGNGCNYHMKDNPKGFDFIKSGDDLATYNIAKKALEYLEYLESQNNDETK

SEQ ID NO: 35 - protein, 996 aa, unknown
  Metagenome-derived sequence
LRFVLQKISWNEVFKKIIKLFSLWFVDHKNDVEIVWKISEELWEFSEKIQNAIELLRVNDSFWFPVEYLSLNYYTINKTPKEYDKEITEKQNNLEKLYEWGLSELYWIDKNQTIEQLRNDMKMFKARQKSAFLEFLQMKNEFSELEELKTYLNDIEKKYKQKKWSKYNFYEELQNNTFELDSSDVDTDIDKVFKAFSLILFLETEKDDYEKLLNLTKKIEKSSTLSERTSYKIERWEFFKGKNENWIFSEDRDTSYDWFCSEFKKVAISYWRLKAEKLSLEREREQARFERWLAILSKDLDWNYYINSFSNNDSKKAFEKLKNINSTSGDYSYFIMKSITLRALQKLCWKENFKKTVVNKISEKFTKVNENDTGRQVRKFKSFEEIGDNIVEFYVDILDKQRTLDVSYRSWYEEWLKKLKWAKDLDELEILLKQETYTLEEHKISKDDFEGILEDYKWNSYKITSEDLEKNIETNNFTKWWNIFWTIENKEHKYISRLNPELVISLRAWEKVFKDRKKHRKSDKSFLLTMSYSHYTDKSYIDDAFIKDEERKSSLEQFNKHYNENHKFDYIYWLDKWTNELVTLWIFKKVWDKLEKVNISEKIPVYRITEKWLKYSKKYSTRVDWLGWEREIFLYKNPSLFIDEIDNEELFEKVNIDSCIWNLNCAKLIKWNIILNWDINWFLSLNKIAAKRHLYDAITKGFMLKDKITFDEVKNNFYYEHTLAWKKFNKVVFYLDSFESITTKDEIEKELNNYIKLVIEHKSEEDVSIDWINKKRVAISWNIVWIILKLQEKFPWYIVWEALNLDQNNKNISSNHAFLWNLINDKIYQKLMISLDVPPILKKYRSELTKDTLTQHGKVFYINENLTSKACPSCNDTLTIEVNWTLKEKDPNKHKVKVYQLFWHLTEYENEMHHLTDEEYDNLYDNDKNFKKFHSNDKWNKKQNSYLAWENCDYNMKHNPKWFDFIRSWDDLATYNIAKKAKEYLEFLEKQKNNNS

SEQ ID NO: 36 - protein, 1112 aa, unknown
  Metagenome-derived sequence
MNKFTKPYEVRKSIKFKLIPEIQKRPHSIPDYELELSELLDSYKGLIENLINFFYSEKEVVESKKSKFSNLKWFKEAFANFDFDEAEEKVFDLKNKEFSKMPRFKHMFFKENFKEDWYAIKDRLIKKNKTKNYEILDSLPFFQKVLKDFFEKSEQLYKELDEIISSPDNASKRKSDLRFVLQKISWNEVFKKIIKLFSLWFVDHKNDVEIVWKISEELWEFSEKIQNAIELLRVNDSFWFPVEYLSLNYYTINKTPKEYDKEITEKQNNLEKLYEWGLSELYWIDKNQTIEQLRNDMKMFKARQKSAFLQQLQNWVPFEEFQKLDFTDNKWELHKDYEILLFNDIGNDKYGEMLEITEKIAKEQDKDKRKGLKEKRWKYFIHHCKKYNKFCDEFKKVAIQYWKLKAEKLSLEREREQARFERWLAILSKDLDWNYYINSFSNNDSKNAFEKLKNINSTSGDYSYFIMKSITLRALQKLCWKENFKKTVVNKISEKFTKVNENDTGRQVRKFKSFEEIGNNIVEFYVDILDKQRTLDVSYRSWYEEWLKKLKWAKDLDELEILLKQETYTLEEHKISKNDFEEILEDYNWNSYKITSEDLEKNIETNNFTKWWNIFWTTENKEHKYISRLNPELVISLRAWEKVFKDRKKHRKSDKSFLLTMSYSHYTDKSYIDDAFIKDEERKSSLEQFNKHYNENHKFDYIYWLDKWTNELVTLWIFKKVWDKLEKVNISEKIPVYRITEKWLKYSKKYSTIVEWLNWEREIFLYKNPSLFIDEIDNEELFEKVDIDSCIWNLNCAKLIKWNIILNWDINWFLSLSKIAAKRKLYLAITEWKIRWDTVVFGYENGNKYIWYKYENRWKIDENPVFFLESFTDIVSEREFEIEFNEYIKLVKNHNSKEDVSISWINKKRVAISWNIVWIMMKLQEFFPWYIAWEAITIKTNEEDSKKNHSFLWNMVNDKIYQKLMLSLDVPPILKKYRSEIKDKEYLQHGKIFYVNKESTSSACPNCNNTLTITNNWWQFEDKTEEYVSKLFWHISQYENEMHHINDKSDQNYEKKWESWILEDGSICDYNMKHNPKWFDFIRSWDDLATYNIAKKAKEYLEFLEKQKNNNS

SEQ ID NO: 37 - protein, 1112 aa, unknown
  Metagenome-derived sequence
MNKFTKPYEVRKSIKFKLIPEIQKRPHSIPDYELELSELLDSYKGLIENLINFFYSEKEVVESKKSKFSNLKWFKEAFANFDFDEAEEKVFDLKNKEFSKMPRFKHMFFKENFKEDWYAIKDRLIKKNKTKNYEILDSLPFFQKVLKDFFERSEQLYKELDEIISSPDNASKRKSDLRFVLQKISWNEVFKKIIKLFSLWFVDHKNDVEIVWKISEELWEFSEKIQNAIELLRVNDSFWFPVEYLSLNYYTINKTPKEYDKEITEKQNNLEKLYEWGLSELYWIDKNQTIEQLRNDMKMFKARQKSAFLQQLQNWVPFEEFQKLDFTDNKWELHKDYEILLFNDIGNDKYGEMLEITEKIAKEQDKDKRKGLKEKRWKYFIHHCKKYNKFCDEFKKVAIQYWKLKAEKLSLEREREQARFERWLAILSKDLDWNYYINSFSNNDSKNAFEKLKNINSTSGDYSYFIMKSITLRALQKLCWKENFKKTVVNKISEKFTKVNENDTGRQVRKFKSFEEIGNNIVEFYVDILDKQRTLDVSYRSWYEEWLKKLKWAKDLDELEILLKQETYTLEEHKISKNDFEEILEDYNWNSYKITSEDLEKNIETNNFTKWWNIFWTTENKEHKYISRLNPELVISLRAWEKVFKDRKKHRKSDKSFLLTMSYSHYTDKSYIDDAFIKDEERKSSLEQFNKHYNENHKFDYIYWLDKWTNELVTLWIFKKVWDKLEKVNISEKIPVYRITEKWLKYSKKYSTIVEWLNWEREIFLYKNPSLFIDEIDNEELFEKVDIDSCIWNLNCAKLIKWNIILNWDINWFLSLSKIAAKRKLYLAITEWKIRWDTVVFGYENGNKYIWYKYENRWKIDENPVFFLESFTDIVSEREFEIEFNEYIKLVKNHNSKEDVSISWINKKRVAISWNIVWIMMKLQEFFPWYIAWEAITIKTNEEDSKKNHSFLWNMVNDKIYQKLMLSLDVPPILKKYRSEIKDKEYLQHGKIFYVNKESTSSACPNCNNTLTITNNWWQFEDKTEEYVSKLFWHISQYENEMHHINDKSDQNYEKKWESWILEDGSICDYNMKHNPKWFDFIRSWDDLATYNIAKKAKEYLEFLEKQKNNNS

SEQ ID NO: 38 - protein, 1130 aa, unknown
  Metagenome-derived sequence
MMNNIENKNLYEVRKTVRFELEPQFKFNYENKDIVNNNFDLNNFIDKYSSFLKLFNEIVFNFNGEKLNGKLKIKYSFLKSYTKNQYYDNKIIKPLKLVNQVEIGSSKKFEYLFQTFSELYKNNFDILNNIKELSQRSLENQSRKSDLAVYFSELSKRTNFVFLYELFNNSLNIENDEVSVKIDKANILTKEIDELIKKIKKSLLPTEVIEKLSFNYYTVNKRKKDYDKEIENKINDFSIQLKDFNPILSITHSGFKNYISDIAEKSTLLTIVDGYNLMKKYKAEQKSNFLKYLYSKSRNEDCDLNIDLFSDILIKPEFNEILDLTKAINILSQVKTDILNLKEANDKNKKNFEIESTLEKYNNNFGTDFGKIERDNFFEKITKLKKLRGDYFFEGNKEKFKFNDYKIFCSEYKKVAKEYGNIKAKIKALQKEKIDAEQTQSWALILEENNNKFLLTIPRDNTNNSENLSEANKKIKYLPSDKNGDIYLNIFDSLTLKALDKLCFGKENNTFRRTIYFNKAEYPEFFNDKGFLKDKFEFSNLVNGQKINDEKLLIKFYKSVLALESTKRQISLKFFTGIEDFLQTNFDTLDEFQEELKKVCYTIIRKTITKQTKDEIINNYQTKLYKITSYDLKKYDEDFIKTLKYKSDLKRKKINNHTQIWLDFWEKENKNNKFPTRLNPEIKISFTQLNLKFIQSNSELFTNRHFGNRLILTSSFTQNAFGKDLDLNFKETQDISNFYEKFNNNFNKNIKPTLKYSYGIDRGENELVSLGIFDLSKDKPEEKGVKIPVYELKTDKFFAYTKTTSTGKNMFPYQNVSYYQYEDFPHYYNEIKYVSCLDLSTAKLINNKIYLNGDIQTYLNLKIVSAKRKIYEIISKSQHKSESLDYDDYNTMIYIDGIKGKNKHIYKHNSKYESILSFDFVKDELKKYIIKVKVDLNDNEEVSIQKVNHLREALCANMVGIIDFLQKIYPGMIYFEEKNEDDRINHFNISNSSLGSKIELKLLQKFASKNFVTPVYKQILTIKDNKKYNIKQLGIIGYVDEKNTSDSCPICGSKLFGHGSFEFENLMHHYTEKYGYNYGDSLDKAKKTTYDICDYHMNDKNYGYFFINSGDDLATYNIAKKGIEYLNSKK

SEQ ID NO: 39 - protein, 1209 aa, unknown
  Metagenome-derived sequence
MLESFKDLYEVRKTVRFELKPSKVLPKIKIKNIDENFINEFFSNYNKLLEIYEKVFFNNREINGKIKFSFSFLKTNLKKEYYELGIDKIKKSASVNKIKLEKIDNYEKLNSSFLSTLKKQNEYVNSFKEKIESPYENRSRKSELVLLIYNLKKRNNFPFIENAFNNVTAENIMVDDEIKKGNMLAKTISNQLVTIEEELLPQNSMGLVIERATFNYFTINKTPIDYDIAIKNKKNKYNEIIGKQNKLKNTYKKQSINEFIKYIIEDGFSKFENQIYEQNGKYIDTGRKGSSFNELTIENAYTLMKKYKSDQKTAFYEIIKKEKYNFLKSQNNKITITYNKDSFNDKKEEITVKLFNDISKGNFDKIAMLTKKIETLAELKNYLEKKEFNKFQEKINTLQEIININFNNDNEEEVENLVKRLNADRVLLKKERGTYFDKESNNFAFTKYKEFCEVYQEVAMTLGKAKADIKSLEKEKIQSLFLKSWALIVENKEKNQFHLLTIPKKNISKARNIILALKNGENNNNILYLFESLTLRALKKLCFGKEFSENRGDYTEKSSPFRKSIEENITNSDFDNINFYIEKQKKDGNNYRVLKQYYDFYINKEENKELDEELLIKFYKSVLQLPSTLEQIIIKNFPDYESFISKEFNNLEEFEEGIKRTFYIKQPLKIEEHKLNKLIKEYNWNLYKITNYNLIKNDLDEIKELKEKERFNRNHIKNHSKLWWNFWEKENIDNKYPIRINPEIAISFVKKDDNFYEENHNKLFKNRRFQDRFLLTTSMTEFATNKSIYLSYKELSELKNFYNSYNYNFSENFKGEYIYGIDRGDNELASLGLFRNINKNIEAVKIETYKLKNENLLFKEGTSNTPAYKNISNYIEKDELFEIKEVSCIDLTLAKLIKGKIVLNGDISTYINLKITAAKRSLYNIFSKGNYKEGDIIEKGKFKDKNTGEEGYDGTLKFNQKEIYKNNSEIEKIISIDKVKNILEEYIEEIKQNIYNEDISIEKINHLRDSICSNMIGIINFLQEKYSGYMFLENKKIIDSNKNFLKDGYQLGTRFEQKLLQKFSNLNLVPSNYKLFLSIRDEDKEIKQLGIIRYIDENSTSSACPVCNPKLYNVNSDDINKLYGHGKGEEKEKSMHHINDKNDENHQEGKWESGKLESGDLCDFHIGYNEKYPDFSFIKSGDDLATYNIAKKALEYLEYLKSLNNDETK

SEQ ID NO: 40 - protein, 1091 aa, unknown
  Metagenome-derived sequence
MAGTPYTGHVACKYCKITSWATYDRIKINKINMNQSFINGQNFYELRKTIRFVLDPKTLKRPYTPSSDEVNLEEQLNNFIEKYQQGINDFKYIVYFGPKTAETKELNKKISIKHSWLRNYTKSEFYSIKDKLIQLDYNGNKASIGNSNLKFLNEYFENWISENQECADALKNCINAPAEKQKRKSEAAHWVRKLTKRSNFECIFELFNGNIDHKNSNDDIEKIKHCLNECKTLLTSLEKMLLPSQSLGMEIERASLNYYTINKKPKNYDEDIAQKASALNEAYQFKADDKAFLNRVGFSDDGVPINELKEAMKKFKADQKSKFYEFVNQKKSYSDLKKNDDLKLLNDISEEDFNKFKETQDKMTRGKHFQFSFPNYKKSEKNFCDLYKNVAVAFGKIRADIKALEKERMDAEKLQCWAVILEKDNQRYVVTIPRDANNNLTNTKQYIDNLQNEENDQWILYAFESLTLRSLDKLCFGLDKNTFIPAITGELYQKNNSFFEKGLLKRKDQFSQNGTDLAAFYKTVLELDSTKKMLGINKYADFKAFISKEYTALEDFEKTLKETCYFKKRVFISEDTKNKLINDYQGNLYKITSYDLEKDDSEALGTLINKKQFNRASPEIHTKTWLDFWTADNETDKYPIRLNPEFKISFVEKQDKDLNMRNLGLLNKNRRLKSQFLLSTTITLLAHEKNADLHFKKTDEIQTFINSYNQEFNKKIKPFDIYYYGLDRGQKELLTLGLFKFSENEKVSFTKQDGTVGEYSKPKFIPLDVYQIREGQYLTKNKKGRLAYKSIDQFIDDEKVIEKLPVNSCLDLSCAKLVKGKIIQNGDVATYLELKRVSALRKIYENTTRGQFKTDRIGFNKDKGCLFLDIENRGKLENNNLYFYDNRFAEILSLDSIIKELQDYYNEVKNKQNIEFISIDKINHLRDALCANAVGILAHLQKTHFGVIVFEGLDARHKNKETTEFAGNLASRIERKILQKLETLSLIPPQHRQIIDLQNSKQIKQTGAVLYIEEKGTSANCPHCETANPDKSEKWLAHNYKCKNSNCNFDASEISKRKDLIGLDNSDSVATYNIAKRGLLEMNQKIEQSKV

SEQ ID NO: 41 - protein, 1163 aa, unknown
  Metagenome-derived sequence
MCPCFQYLTHFSKLIRPTEWQFAENLTRIILIVIQPFKINHMSTIITAKQLEALADIYQTRKTIRFNLLPVSLSHKKTSEDEFKIALGQLIENYKQVVNNFNDTVFSCENEIEILNPRIKINCRWLKVYTKQDFYQNALRLKNKNIDLGEADFLLEIFQEWSKRNWSEEVCTEIEKPGILNEIEELKNQPLNCQKRKADFAYWVHQLQTRNNFPFIHELFENINDEMGGENDERIANTKKILDICEGCLKKIDDYLLPSQSLGQEIERASLNYYTINKESKYYENEIKNKEKTLEEPPTSLRFYKDTNFLKNISKDLPFFIESLNKSIPENAKFIASVGDPNKAENWSLAQAYQILKFYKGKQKSNLMEFVSQKPSFSELQKEKGLSLMKKIKDKRRSNEQVFQDFITLAKEIEQLGTEKFRLDINSENYPQQSIALRKKIKETTQKRNKYFIYNFTEYIDFHKGFDEIAKEFGKINADIKGLKKENIDAERLRSWAVILEKNSQHYLMTIPKKDGKLPEAYREIKSLRSESGENLWTLSVFESLTLRALDKLCFKKIDNTFIKSIEKELRGKCPEYFKRGKFMLKSEFKDGQPPAEFYQAILSLETTESVILVNEYLRDEKRDILLEKKFTSLQNFQSEMEKICYIRKEIKISQATKEHLEQKYDADTYQITSYDLEKERQNPEEHTKIWKRFWNQNKKSGYVTRLNPEMIINYVEQRIGSIKDKGEKEVKRNRRKQAEYILALTITENNDKPKTDMALASKDAVKKDIEKFNTERNLILSNDPYSFYYYGIDRGQKELITLGVFGFENQDIAVSGWDKNGSLISKNYKKPRPVTIEAYELPQEKFLEEIEYTVSNGETRSFDAYKNISLCEHLLVRKDVDSCLDLSCAKLIKGKIVVNGDISTYLQIKKTAAMRYITDGLAQHQFTNVLIQEREGTLCLEEEKRGITTLVELYHFDSRFDNLVDRANLKTELQEHFDKIREENSQGDIYTIEKINHLRDAICANAVGIIVHLLQKYPGLITLEDLDIEHKSREFSKYYGDVGSRIEIAFINKLQTLGLVPPSCKMVIGMQSKKEINQLGIIHYVKTDGTSGDCPHCGQRIDKKTKDTNKWGKHQFKCDNNGKSCGFSTYEDKDHKELDFLKNSDDVATYNIAKLGFESIVV

SEQ ID NO: 42 - protein, 1113 aa, unknown
  Metagenome-derived sequence
MAGFDKLKNQYEVKRTIRFNLTPVHFSYKKISSESFESKLKEFVSVYGDVIDSFKRMMFIEEYGEISLNRDIHVRHEWMKIYAKQDFHLNKEIIVRYRKNRKGENIKSNTDTSLEKTPFIFDLFNKFLMDNLSSDDYKDGILSNLEVIIREPLDEKSGKSNLSYLLNKIQKRSNFEFIYQLFKNMQSKKSDFEIEECKKKLDRCKELLLSLNHYLTPKNSSGLEVERTSLNYFTVNKKPKDYKGEKKRIYDKKNIPINNRVLNGNQSKYNEVLKESGFYNRYNKKNFSDFSLEEFYKNLKEFKAEEKSKFFELINFGASLNRINEDIPLFELSDIERGKNKELSFDSFQKETEKIKKLSDDLNGQLNDTLKKEIKELKIKRGRFFNVNDDENCPFQRYITYTKLYRDVAMEYGRIKADTKNLEKEEINAERLASWSVFVKIENGYFLMTIPKHKDNHSSLSSAYYDLKDTKSVDGEYNIYITESLTLRALEKLCFGLDKNTFVNEDFLEELNMLSPEYIVHKDGKKSIKRKDEILKESELKLINFYKKVLSMITTKKRILINDFKDNSCKDNYLSGDIKTLRDFQIALEKKCFTRKEVRVSKDFLNDFRNKYSAKLYKITSFDLEKRRENPESHTNLWEIYWTQSNEGGYTTRINPEMRINFIDKREESIKDKSGNEVERNRRKDKEFILSLTITEHNDKPKFDMAFADKKKVIKNINDFNTTLNSKLQDGKLGIYYYGLDRGEAELVTLGAFKFLDEIVKVDTGCLYNKPKAVKIDVWELPEDKLMEQVPYETKSGTMYFDAYKNISKCEHLLIKKETESCMDLSCAKVINGKIVLNGDISTLINLKLENAKRRINNHLYDFMKAKYKKDGKVDIRIEYKEKTKNKPERFDLYINNGEFKELGIYYPKFAIEKKIAMTQLDQYIVELRDIINNQKSVGLNIELEKVNHLRDAISSNIVGILNFLYKDFPGFISLENLETDDKNEKLGKSKVNLASRIEYKLLNKFKTLGLVPPNYKMVMSLQSKRDISQLGILNYIETSGTSSNCPHCGQSINDKEREENKWRNHQFRCSHCGFSSYENEDHKGLDFLNSSDDIAAYNIAKRGLEYINSLKK

SEQ ID NO: 43 - protein, 1169 aa, unknown
  Metagenome-derived sequence
MFFSFSFEMNDFQNLYEVRKTVRFNLLPVSHNYQKPSEKQFKEDLENFILQYKQVIEKFSEIVFAQDEDEKQILNRNTKISIAWLKTYAKQDFHTNRENLIKRKKNGQKANTYVSLEETEFLLERFQIFGEKNGEIIKNLELLKNQPLESQKRKSDFAYYVHQVQQRTNFVFVYEFFKNAQGKQSDTLITETLPLLKNCEKLLQNLENYLLPMQSFGQVIERTSLNYYTVNKKPKDYPKEIKNLKNKKDEKIYNLNKNQKFTIHQSLSSFLIKEIKNLDDEYFVAENFNGTEKFIKDWNHLKLQYAYKFLKEYKAQQKSKLFELVLGQKSQAMIMQEVPLFDFEDKKDGNGSVIKTKEDQFQDFYDACINIQNKSTEYEQSKDKKLKSEITTLKKKRGNDYFNVGDVKKTKCPFPKYITFCEFFKAVAMEYGRIKADIKSLEKEQIDAERLKSWSVLLEKENRHFVMTIPRDKKIKVFNEKEKKEIEEYQLPHVYRKIKQLKDSETPIWTLYHFESLTLRALEKLCFGMDKNSFITDPELSRELSSFTEYFENGKLKRKDQMIQKKTDGSFDESILIKFYQKILSLEATKKMILVKEYLPDEAIKKRFRETKFETLKEFQVALEKQCYIRKAIKISDQKKQELEKKYGANVYQITSYDLFAQRKNEEAHTKLWKQFWSQDEKSGYTTRLNPEMKISYVEKREDSIKDKEGNEVKRNRRKQAEYILSFTISENNNEPKFDMAFADKEKVKANIEAFNTTLNDKIKGNPYNLYYYGIDRGDEELLTLGIFKFEDQDISPSDSNKSGTYKKPIPIDLEVWELPKDKYLKLVPYNGTKYTEAYKNISYADKEGLLQKKTIQSCLDLTCAKIIGKKLVINGDIATLMNLKLENAKRKIIEGIDTLINVKTNKKGIKMAKIQHKPKSKNKAEHFELSITLEDGNTKSLIVYYIDSDFEKNKIQPELEKILQDFLTEIKNQGYISVNIPIVKINHLRYAICANAVGVLSHLQKKYFGMISFEDLEIKKKNEHFAQNNTNLGSRAEFALLRKFQTLGLVPPNYKMVMSLQSKKEINQLGIISYIKTAGTSSNCPHCEQSITDKVKKEHKWKNHKYKCDDGNGNSCGFSTYSESEIAQNAWSFSADKKGLDFLESSDDVAAYNIAKRGLELILKKPQS

SEQ ID NO: 44 - protein, 1171 aa, unknown
  Metagenome-derived sequence
MENATIKNPKYSYMKSIRFNLIDTDNKLSDLKSNSNQDSIINLDNIFSSYDKLIKEFKSLFFEVDKNKDYKRNNSENYILKRTIKIKKQWFKTYFKEGWNFKEEKKQEIEKTQTKINETVSKFENLCKQLRTDIDHDKNRAHKKHRNSNFSSILQQIKNKDVFYLLNDLVKQSINKNEVSKVNSLIKDFSSFEKKLNQLSKEYLASQSLGIELYRSSFNYYTLNKSSKHYLKQIEKKIQNYKDEKNKTHIEFQNNSIKVNDMKLQLTSKDLEVMENIKSELKIKFPLNLEESKYFMKLFKAKLKSDLFKDCQKNNEIKDYSCLFNENKKLKKIFDLTREIQNENEFKEIQNLKKDRGEILKSFENWKNFINSYRKISQDYGRIKTNIANYEKEKIDSQKLRYWNLFLKKDNQIYILFVPIEFRQDVKEKITNANTVNSPNKIFMIKSLTKRALHKLCFNEYGSFLNEMKKKKKETYNEIIKFKQKFREEFEQNKIEKLNQELIQELKKKKIKFENDELKRSKNFVGFMKNFENKKYGQFKKQFKEKIEKLNQKYTKQKEEKTTKILKEVLQSDYAKSRLDLKDFDLQKVYLAQTSNEFEEELEKECYKILPYYIDNKLLSELETLFKVFKCKIQSYDLDKRFKNETQTPKSLEKRHTREYWNEFWQKLNQSKIRLNPEIRVNYKEKDNEMERYLWKRYNVDKEKIKENKYGFNRNLQDKYIINFSFLVNTGKKFLDLGFADSNEIKHEIEDFNIDLNKKMKNPFFCGIDIGEVELASSAIYAFDDKHKYQFNNQKFIRPVIPDNLPIKCLRLKKEYYTKSRKPSKQKVNFKKIEERQIISNLSYFSDQEELFDEISPFALNLTCSKVINGVIIENADILTYLQYMKKLAKRRLFEIYSKGFLETDNKKHNFQDLKLDWQYPKESNKYKSNNLILCDKENKIVKAKIFTFIYEYEGIKTKNGEYEFDSMKDYFNKYLNKLKKIKKSNDNKIIKEDIPRINNLRDALVSNMIGVLNLFNKFVDLYVVLENIPNKNKQDEYLIKRLESALFQKFQTFGMVPPNVKNLIKIKKMLQTKEDKDSGKEIQIGNILFINERKTSQTCPYCENSDNNQDHEKGIFLCSKCNFSTNDKEKIHLTELKILKSCDIVAAYNIAKKGYQFIINGTKHKNIKSE

SEQ ID NO: 45 - protein, 1158 aa, Bdellovibrionales bacterium SP5DBV1
MENFKNLYEVRKTVRFELKPSRKKTFAGGDIFELQKDFEEVQKFFLDIFVFAIEQEKLYQEEEEEGKLSRYTKIEFKKKREIKYTWLRIYTKNEFYDWNGKNDKEKNYALSKIDFLEKEILRWFNEWQELTVNLKNLTQTKEHEKERKSDIAFVLRNFLKRQNFPFIKDFFNAVIDIQEKQGNESDEKIRKFREELREMKKNLNTCAKEYLSSQSKGVLLHKASFNYYTLNKTPKEYENLKLQKELEIDNILPKKICKRVRWNKEKKQEDILFECNSDWLVEIKLGYDIQKWTLDEAYQKMKTWKADQKSDFNEKIGNFIDQYLKKGFIEDLMNENEKKNAEAILREFSVFKPIENFYFYDFLERTKEIKILSNQKNNILQKYNKNAKYFEKIITYKIKDKEDLTEDEKEYQELEKSIEKKAKERGKFFNAPKEKVQTQHYFELCELYKRIAMKRGKIIAEIKGIENEEVQSQLLTHWALIAEEGEKKSVVFIPRKNGEELENHKKAHEFLQKQEKKEFGDIKSYHFKSLTLRALEKLCFKETENTFTPEIKKETNPKVWFPKYKQEWNDEPQKLINFYKQVLQSKYSQKYLDLVAFGDLKSFLETSFDDLQIFESGLEKTCYIKVPIYFSKEGFETFTNRFDAEVFEITTRSISSESKRKENAHAEIWKDFWSKENEEKNHITRLNPEVSVFYRDEIEKKSNALRGNNKSNINNRFSASRFTLVTTITIRATHKKSNLAFKTEEDIKSHIDKFNEAFQNFSGEWVYGIDRGLKELATLNVVKFSDEKNEFGVIKPKEFAKIPVYKLKDEKAILKDENGKDLKNAKGEARKVIDNISEVLEEKKEPDSNLFEKQGVLSQGISCIDLTQAKLIKGHIILNGDQKTYLKLKEISAKRRIFELFSTSKIDKNSELRVEKTTISINSEDGKRDFYWLTKNQIVNSETKKEIQKEQQEKLDNLKVIFIDYLEGLCVKNKFEDIETIEKINHLRDAITANMVGILFHLQKEFKGIIALENLDTVREQSNKKMIDEHFEQSNEDISRRLEWALYRKFANMGEVPSQIKESIFLRDEFKVYQMGLLKFVEVSGTSSNCPNCDKEVGKTNSHFVCKGENNCGFSSKENRNLLEQNLNNSDEVAAYNIAKRGLKLINQKWNNTSKSQN

SEQ ID NO: 46 - protein, 1114 aa, unknown
  Metagenome-derived sequence
MLQKGTSKMLIQFKNHYSYNKSIRFKLEHKNGKLPKLESDNVDLNKLVDIGNSLKDIFEELVYTKNNYNKLNSLVSIKKQWLKIYFKNEFYSNGKIQNYSLSNFSYLPNKLIEWLNNWQNNLKALIELTKQQDFNKTKKSEIAYILSLFNGKYSFSFVKDFSTCINHKNSQEQILKLQGVVENFEKVLNLCIQEYLPSKSAGVVIAQGSMNYYAINKEPKRYDNILADLNQKFEELDKEYIAMKQYKSSQKSRLFEFIRKGFSKDQILSEFKKKENNEVSFVYNNQIIIRIYTQELFKDSYCLGEVIKLTKKIEELNESKDSNNNLPEETKKEITKLKKEIGFYFIRRTRGKSHNNYFKSYYGFCNDKFKKKAQERGRLLTKIKAIRKEKIESQNLRYWSLILDDGKDKFLWLVPKENMQEFRRELSKIHPSGESSLFLFHSLTMRALHKLCFAQESDFVKEMPKVLKEEQLNCEKASNDTETNKRIKRNFGLNYIKTKDELTLSFLKKLIISEYAHERLDLNHFDLSKLQVATTLNEFEEYLEDACYYLEKISISSSMIKELLEEYNILNFRITSYDLEKRNKNTYQTPESDIKRHTKEIWNKFWEGDRFIRLNPEIKIRYRQKNQNIEDYLKEKGFDLTKIKNRFLQEQYSVSFTFALNAGKKYPKLAFVKTEEILEKIEEFNDEFNKQYFDNSYKYGIDRGNIELATLCITKFNKNDTYEYKGKKYLKPNFPTSQEDIKTYELKNEWYKRTAISNIETKPKNKKTPKRIIANISYFIDNVENEEWFNKKTCTSIDLTTAKVIKGKLILNGDVLTFLKLKKEAAKRILFELVAQNKLTAKNKELKWKSDDGNNSDSVRLICDVLDNETNSIYFYEDSKYGRGFEGLLTTDKTAYSKEGIRINLQNYLNHLISEKENKSNKAYSHVPSIEKINHLRDALVANMVGVISYLQAYYPGIVVLEDLNHKLLIKHFEDLNINISNRFEHALIEKFQTLGMVPPHIKDYLEIRSSFRMSRNDSSQFGALIFVSKEGTSKECPYCEKKWNWGKEKEIELKFSKKQYICGKENSCGFDTKHIQNTFEFLSEINDPDKIAAYNIAKRGFKSFINKSSIKKQ

SEQ ID NO: 47 - protein, 1073 aa, unknown
  Metagenome-derived sequence
MTHQYEFTRTIKFNLNNKKDNDAAQLKKFFSDEHINFQELFNDFEGSFSALLDQFKKAVYLKSGNNFGNNLRVKNSLEIKKSWLKQYARDEFYKIDEKQRKYNKFPANLFQSIFNGWLKRNESLLEQFKKINQMPQESQIKRSEILTLLQEIKITDNFLFIKNFVQPGIANDKNSDSDLENLKEKVDQFEILMNKAIFAMAPDLSQGVEVCRASLSYYTVNKVSKRDFDTELEGKRKELKQTYNKELNQQLLQTVGFLDYLENEYQSDIQLVSIQDLYKALKKFKAQKKSEFMQAVQQGKQAEELIKDFPLFNVQKDVMQNFINISNKIDEKNLQKQKSQNEKEKKGLTEEIRKLRINRGKYFQNRWGFPNYVNFCNNVFRPVAIKIGNLKAQIRAIEQEKIEARLLQYWAHILKKGNQYYLLLIPKEKMQEVKDFLNNSSPSQEGEYTLYSFNSLTLRALKKLIRKNLGKEQTHLQNDNTAIELYKKVLQGKYSELQNLDFSGFEEKIKEIVQGNYNSEEYFRLKLERVAYCCFEQKISQETIAHLHRSFSALLLEISAYDFERNISSKMKEHSKVWQEFWTVENKNEHFPIRINPEIRIFYRPKREQEDLQKGKNRFAKDHFGVAFTITQNAAQKNLDLAFAKEKEISEAVKKFNEEIIGEFIKEKGNDLYYYGIDRGQQELATLCVVKFSEKQGKTKLANGEMRKFNIPVPVPIKLKLYRIKEDCLNSEKEIIIDRYGNKKNVKMFENPSYFIDEKEKFEEIESTCFDLTTAKLIKDKIVLNGDVRTYIELKKANGKRQLFEKLSKIEDKAEIEFCEDENGKRFQIKSKTTEINKYQYIIFYSPEDEKIMPRDEMKKYLQNYLNNLRNGNLAKENISIEKINHLRDAITANMVGIIAYLFLFKKYQGIINLENLIETHFSQNNENIERRLEWSLYKKFQKFGLVPPQLRQTVFLRKENNQLNQIGIIHFVSKKNTSACCPRCGNIVPMRKRETDKFKYHTFICDKCGFNTQNPKSPFDFIKNSDEVAAYNIAKSNLNKFYYNGGLYSNFKNKGFYILSLFGIFTFGVGKF

SEQ ID NO: 48 - protein, 1011 aa, unknown
  Metagenome-derived sequence
MDYQQYEFTRTIRFNLSGDDKRALMLDLLDDTQEGMLAAFQETYKNLLFAFQEAILRADGSGNLRVGRLEIKKSWLRQYAREYFYALSEDERRCKNKFQAKLFDRVLSDWLERNNELLQRLNNILSLPQESKTGASDLSLLVRQLKGAEYFYFIRDFTQSGIINDKDSDEHIKNLAGIVEKFETLLDKVLFLTAPNSSQGVETTRASFNYYTVNKISKNFDENIKKANGRLCSSYQNSMNEELLRKVGFLKYLKDEYRAELQNVSLKDLYEALKKFKSQQKTAFIQAVQKNKSEKELMREFPLFNGKQPDTLQKFILETDKIKRGAYFQKWGFDNYISFCNKIFKPVAMETGTRKAKIRALEQEKIEARLLQYWAHILVKDGKYFLLLIPKEKMGEAKVFFARLSDQEGGEYTLYAFNSLTLRALKKLIRRNLGKEQVRLSAGDADAIALCQEVLRGRYHQLKDLDLSGFEKEIAEIANTQYENEEEFRIALEQVAYYLSERKMNEESIEYLKKNLGAILLEISSYDLERNITGESKEHTRLWSDFWNPNNKKECFSTRLNPELRIFYRPPREQKDPKKQKNRFSKDHLAVAFTIAQNAARKRMETSFAEEKDLVEQVKKFNEEVVGKFIDEKSDNLYYYGIDRGQQELATLCVVRFSKEHYEAMLEDNFIKKFSKPIPAQITAYRIKDEHMSYRKNITRDLKGNETEEILFKNPSHFIDEVENFEEVSTPCIDLTTAKLIKGKIILNGDIQTYLALKKANGKRQLFEKFAKIDDSAKIEFDDSEGRFQVKSKATEREEYQFLPYYGPEQENISPREDMRRELQAYLDKLRSSESFEEDISIEKINHLRDAITSNMVGIIAFLFTEYPGIINLENLHSRENIEKNWRKNNEDISRRLEWGLYKKFQKIGLVPPRLRQTVLLRENETERQEKLNQFGIIHFIPTEKTSARCPYCGENTPMKQRNEDKFKLHAYICRSNEENCGFDTREPKSPLEFIKNSDDVAAYNIAKKRL

SEQ ID NO: 49 - protein, 1087 aa, unknown
  Metagenome-derived sequence
MDSIKKDPKEAMPRFETVRTVRFELKPSADTLEKLKAVLPRGDFQVDIEKFITGLRKFYSGLADIIIDKSEEGFALRRGIEIKYGWLRSYTKNDFYTFIEGGDGRLPIKYGISDVGYLKRELQRWFVEWKEIILELEGMIQAPLESQRRRRDFAQLIRGLKKRQNFEFIREFSKALCNTNDPATDHLIEDLRISINSLEGELQEVEAAFASSQSAGFQIARGSFNYYTINKDPKSLKTEEKEERDKLNRSLSSFKDKFGSQEFFLSGKFSFIDAATGEGRKEDSASWTLEESYGKLKEWKSGQKKKFLEAIQAKIITVGNFSSKFPLFESSKEDFLAFLDLSERMAEANKKKSREENEGRKKEIDKGIKQLAQQRGEFFNKPGKRVQTRKYYDICQIFKNIAFKRGGIVARISGIGNERRESQSLQYWALIMEEQKKHFLIMIPRGESENYKKARESIEKRLAERGEIKIYHFKSLTLRALEKLCFKEIGNTFAPELKKQGVRFPRYKQEWGGQEERMVKFYQEVLTSSYAHNLLDIAEFGDLQSLLKKEYKSLVDFRSDLEKAAYLKKEIYLADDEKESFLRNYDALVFEIDSYDLRIESENRPENKGHQDKAHTRLWKDFWTSQNKEIGYGTRLNPEVKVFWREADEELSKSLSSGKISQPRKLDYFRNRYSRNHFNLAITITSNAIERKNDLAFKSISDIEKYIQNFNDDFNKNFKGEWFYGIDRGLKQLATLCIMRFSKQSYPINGKSLSCPEFSRIEAWQLKDENYSEDVKREDGTQFRRSAIKNLSYFLDKAELFEKKMVSCIDLTTAKMIKGKIVLNGDLMTYFKLKEHASRRKIFSLFSESKINDSSEIKISKSGSTIVIKDNCQEYQPIYWISQRQEKKTKGMYREIETPEQIIKKLDGYLKDIGRNNINEDIITVDKINHLRDAITANIVGVVSHLQGLFPGIIAFEDMDEEDHISKHFTQSNENISRRLEWAFYRNFQVKGLVPPQVKSTIFLRKEFKDKQFGIVQFVKMENTSCNCPRCGEKFPKTSDHRHYICGNPGCGFSSLGNRMEFSPLDDSDKVAAFNVAKNAFNKLYEI

SEQ ID NO: 50 - protein, 1290 aa, unknown; identical to SEQ ID NO: 28
  Metagenome-derived sequence

SEQ ID NO: 51 - protein, 1057 aa, Roizmanbacteria bacterium GW2011
MEIQELKNLYEVKKTVRFELKPSKKKIFEGGDVIKLQKDFEKVQKFFLDIFVYKNEHTKLEFKKKREIKYTWLRTNTKNEFYNWRGKSDTGKNYALNKIGFLAEEILRWLNEWQELTKSLKDLTQREEHKQERKSDIAFVLRNFLKRQNLPFIKDFFNAVIDIQGKQGKESDDKIRKFREEIKEIEKNLNACSREYLPTQSNGVLLYKASFSYYTLNKTPKEYEDLKKEKESELSSVLLKEIYRRKRFNRTTNQKDTLFECTSDWLVKIKLGKDIYEWTLDEAYQKMKIWKANQKSNFIEAVAGDKLTHQNFRKQFPLFDASDEDFETFYRLTKALDKNPENAKKIAQKRGKFFNAPNETVQTKNYHELCELYKRIAVKRGKIIAEIKGIENEEVQSQLLTHWAVIAEERDKKFIVLIPRKNGGKLENHKNAHAFLQEKDRKEPNDIKVYHFKSLTLRSLEKLCFKEAKNTFAPEIKKETNPKIWFPTYKQEWNSTPERLIKFYKQVLQSNYAQTYLDLVDFGNLNTFLETHFTTLEEFESDLEKTCYTKVPVYFAKKELETFADEFEAEVFEITTRSISTESKRKENAHAEIWRDFWSRENEEENHITRLNPEVSVLYRDEIKEKSNTSRKNRKSNANNRFSDPRFTLATTITLNADKKKSNLAFKTVEDINIHIDNFNKKFSKNFSGEWVYGIDRGLKELATLNVVKFSDVKNVFGVSQPKEFAKIPIYKLRDEKAILKDENGLSLKNAKGEARKVIDNISDVLEEGKEPDSTLFEKREVSSIDLTRAKLIKGHIISNGDQKTYLKLKETSAKRRIFELFSTAKIDKSSQFHVRKTIELSGTKIYWLCEWQRQDSWRTEKVSLRNTLKGYLQNLDLKNRFENIETIEKINHLRDAITANMVGILSHLQNKLEMQGVIALENLDTVREQSNKKMIDEHFEQSNEHVSRRLEWALYCKFANTGEVPPQIKESIFLRDEFKVCQIGILNFIDVKGTSSNCPNCDQESRKTGSHFICNFQNNCIFSSKENRNLLEQNLHNSDDVAAFNIAKRGLEIVKV

SEQ ID NO: 52 - protein, 1080 aa, Roizmanbacteria bacterium
MDRFKNLYEVKKTVRFELKPSRKKIFEGGDVIKLLKDFKKVQRLFLEIFVYKKKDSKLEFKKKREIKYTWLRTHTKNEFYNWSRRSDIEKNYVLSKIDFLPEEILRWLDEWQKLTESLEDITQTEEHKQKRKSNIAFALRKFSKRQNLPFIKDFFNAVIDIQGKQGNESDVRIKEFRGRLKEIEKNFNACSKKYLPTQSNGVLLHKASFNYYTLNKTPKEYEDLKKEKELELNGVLSWAIYKRERVIDRRTEQTEILFDCDIDWLKKIGLGDEIQNWVLDEAYQKMKIWKANQKSDFIEAVARDKLTFQNFRKKFPLFDASDENFEICYKLTKELDKKPKDAKKVAQERGKFFNAPKEKIQTKNYFELCELYKRIALKRGKIIAEIKGIENEEVQSQLLTHYAMVAEEENKKFIVFIPRKNGEELENHKNAHKFLQGKEKKESGDVKVYHFKSLTLRALEKLCFKKTKNTFAPEIEKETNPKIWFPKYKQQWNKTPEKLIEFYKKVLQSDYSKKYLDLVDFGNLNTFLKTDFTTLEEFESVLEKTCYTKVPVYFSKKEFETFKDEFEAEVFEITTRSVSTGSARKENAHAKIWKDFWSRKNETAGHTIRLNPEVSIFYRDEIKEMSNASRQNRTSDVNNRFSDPRFTLATTITTHADKKKPNLAFKKIEDIKNHIDSFNTVFNRDFSGVWVYGIDRGLKELATLNVVKFSDVKNKFGVLQPKEFAKISIYKLSDEKAILKDVGGKSLKNAKGEDRKVIDNISEVLEEGKEPDPILFENRIVSSIDLTQAKLIKGHIITNGDQKTYLKLKETSAKRRIFELFSNAQIDKNTTISGNKTIMLGKNNTIYWLCEWQRQNPWRDKKESLMQSLKDYLQNLDIKNHFKDIETIEQINHLRDSITANMVGLLFHLQNKLKIHGVIALENLDTVQKKSDSKMIDEHFEQSNEDISRRLEWALYRKFANTGEVPPQIKESIFLRGEFKVCQMGILKFVEVGGTSRGCPNCQSEWNQECGNQCNPKCNKCTENDSYKKNKRKNVYICKDDNQCKFSTEESRNLLEQNLHNSDDVAAYNIAKRGLEINSI

SEQ ID NO: 53 - protein, 1167 aa, unknown
  Metagenome-derived sequence
MENFQIRKSLRFKLESNENNNLINETTNQLSTRQDFDLSNFSTKLDNFLNDLTDYLFYEDKQGDLIIKKYLILKNDWLKTYAKQQFFICKNSKQTRGNQRVQFTIEDCELEDMITEVRENVYDICDELYERSRADLHERYKRSGIAVLLNRLNTKDNLPFLVDLVKLSIDKKETSDLSIRLKSAGEELLNLLKQAIEHFLPEQSSGMCITKASFNYHTINKKPIDFDKEIKNVESSLLTSRQAQERNKGGIDNNVWKTAWIDINIKANGLPLCLGDSPFMEVDSYASLRQILKNILATQKSQFQEAMQRGDSYRELKESDLYLFNNISEDEFNKYFEYTEEIEKLATKRNQTHDYKLKKDLASKIERLKRERGSLISEADRRNTNYFRTYKEFAKFYRKVAQSHGRELAKLLGIEKEKVESQLLGYWAMIIEEKGEHKLALIPRKKTNDLKRRLEESKNSKEEVKLYWFESFTYRSLQKLCFGNLETNTNTFYPELRKDGALLRKFSLQDRNGYPKFISGEHEFKGDELKKIDFYQSVLASDCAKNKLNLPYDEVYNNVVNKQFDNLEDFKIALEQVCYKRCITTNKHLIDNLASEFGAQIFDITSLDLRRESNTKDKAEKYTYKEKRPTELWREFWKEENEEKGFDIRLNPEISIIYRKAKESRIEKYGADSKKNNRYLHDQYTLVMTFNEHCNTPTKNLAFANINDEQKVIEEFNERFKKENIRFALGIDNGEVELSTLGVYFPEFEKESIEEKLAELRNVEKYGFDTLTIKDLTYKETDLKDKDKKIIENVSYFLKEDLYCRTFGKTAKEYKEMFEKVFEKKRLLSLDLSAAKLVCGHIVTNGDVKALYNLWLKHAQRNIYDMNDHSKREGLKKVDFRYSEDLNTEERRIFIAYLNEGNDKYNKLSKEEKNAYVDWLYEAWADNEIENKKFYNVYKEQKIKGDYLHNVLLGATYIGEELQGVEEIANIDHIRHVFKFREDFEKIFTREEIKKAIDSYNKREISNEVLDLNLNKAKSSIVANVIGIVDFLYKYYKNRFGGEGIVVKEGFGISKVEGDRMKFSGNIYRMLERKLYQKFQNYGLVPPVKNITEFRGKDNAFVEFGNICFIDYSGTSQRCPICEKGRLNHTETCSENCGFSSKNIMHSNDGIAGYNIAKKGFREITKK

SEQ ID NO: 54 - protein, 1171 aa, unknown
  Metagenome-derived sequence
MNNIKTTKAIRFKLENSASNREIQERIDNLSSNNGFDLVSFVTELNNYIDLLNGYLFCSRGDRFYLNDKFILKKEWMKNYAKQEFAEFKTKIDNTANGVRVQYTVGDYRVESKIQAAFDNIDEIYGELCDDASRELNERSKRTRTALLLKRLYAKNNLPLLIDFVENSTYKKEVGNDSLVLKSMGKRLMEHLELGIQEYLPEQSAGVSIAKASFNYYTINKKPIDYDAKIEEIEKKLVVSNIDRTWNDRDNKIKNNGRLWNIVKADIASRQNNKPLCIGDSPFMDVDEYASLRQIMKNILSEQKAAFNELMQQGGSYKELQNTDLYLFKDITKDEFDKYSELTEDIEELATKRNQTKNEQKKKELKSQIERLSKQRGSFISEADKTTEKMFKTYKAFSVLYKKIAQKHGKELAKLKGIEKEKAESQTLQYWAMILEKDNRHKLVLVPKAKANECRSRLVEADNANGVIKLYWFESFTYRSLQKLCFGNIENGSNTFYPQIRRDRELGRKYSSLDRNGYPKFISGEHEFAGDEQRKIQFYQDVLRTDYARKNLNLPYGKVEERIINSTFESLDDFKIALESICYRRAVCTNIHLIDALESEYGAQIFDITSLDLRREDNIKDKEEKYSYSYKSHTAVWKEFWTAENEKRNFDIRLNPEISIIYRKAKESRIEKYGVDSKKNNRYLHDQLTLVTTLSEHCNSPERNIAFATIDEEERIIAEFNSKLDKGNIRFAFGIDNGEVELSTLGVYLPEFKQKSIESSLTEVNNVDKYGFDTLTIRNLMHSEKDVNGRDRRIIDNPSYFLKEDLYCRTFGKNGEEYKAMFDKVFEQRRLLTLDLSTAKVICGRIVTNGDVISLYNLWMRHAQRNIYDMNEHIEGGGAKVYLKKSEVLNDNEKRKFLDYLNDGNERYERLSDAEKKDYINWIYKIWDGVEVENDRFAEVRRKQKRPGFYFHNVLLAASYIGEEVQDVKDIANIDDVRHVFKFREDFKQFKQEKEILDEINKYNIKVISNEELDLRLNQLKSSLVANVIGVIDYLYKQYKERFGGEGIIAKEGFGIEKVESDRMKFSGNIYRMLERKLYQKFQNYGMVPPIKNLTAFRSKDKSYTQIGYICFIDYDGTSQRCPICNAKLAYNHGLECSEKCGFDSEGIMHSNDGIAGYNIAKKGFESIVNK

SEQ ID NO: 55 - protein, 1116 aa, unknown
  Metagenome-derived sequence
MKNYKLTKTIRFKLEADEKNISDIKKEIKSIEAKSNEFELANFVTELNNYIANIKAYLFYQRKDGLSAIKDKMTIKNEWLRQYAKQELVEFKVKTQKSNYTGNKRREQITISEISELSQKITKAFDELVVIYTELADSASLELNERARKAKIGLLLKRLCAKNTLPLLSSLIDNTSDKNETDDLSIRLKKQAIKINAQLLVGIRMYLPEQSGGLPITKASFNYYTINKKPVDFKERIEDLEKKLEVQDLEKLNIYFDKKKRTEKDYLEKKIFKLLEADVQKSLPKNQTLCLGEAPMIKTDSVSLRQFLKNIKAEQKKQFSELMQNNIPYEELEKSNLYLLNNIKSEQFTAYKEKTKKLEEIATKLSNQNLSEDVKKKLRSDKEKIAKERGGIMKDNFFAWKSFANFYRSIAQKHGRILSQLKDIEKEKAESQLLKYWALIVEENNTHKLILIPKEKAGECKKWLETQIYIQSTNNPKIIWLESLTYRSLRKLCFGFVENGNNEFNQNIKDLLPKDENGYTIKGEFDFKGDEQKKIKFYRRVLSSKYAQQVLDIPAEQIEEDIIDQSFDSLDDFKIALEKICYSRHVVCPSDIVEKLKHYDAQIFEITSLDLKNPENVKEKQDRFEHFDKHHTQIWKNFWTGENEKNNFNIRLNPEITITYRQPKQSRIEKYGEQKSDKKNRYLHPQFTLITTISEHSNSPTKILSFITDEEFKTSVNKFNKNLKKENIKFALGIDNNEVEFSTLGVYFPAFAKTTNEEKIAELKQVKKYGFEVLTINDLNYKETDYNNKERKIIQNPSYFLKKENYMRTFNKSEQDYEKMFAEQFEKKHLLTLDLITAKVICGHIVANGDIHTHFNLQMRDAQRLIYKMNDHTQEETIGRIKDFKIKETEAKNKVYVNIDANFIDGGFKSVFEIRPEFSNIKLKEEILSEIKTFNTRSISNEELDLKINHLKRSIISNAIGVIDFIYKQYKERWGGEGLIVKEGFDTKEVDKGIEKFNGNIYRILERKLYQKFQNYGLVPPIKSLMAVRADGIKGDKKAILRLGNIAFIDPTGTSQECPVCSEGELDHTTTCSKNCGFESNGIMHSNDGIAGFNIAKRGFENFYGNKDKIVEIKFK

SEQ ID NO: 56 - protein, 1168 aa, unknown
  Metagenome-derived sequence
METYKITKTIRFKLEADEENSIHIKEDIINIETNDNEFTMVDFVSNLGNYIKDLKNYLFYEKKDGSLSFKDKIIIKNEWLRQYAKQDFVELKSKKRINLRNNRMEQIKIGDIPRLSSKIEEALDIAKEIYSKLSDDATLEQHERTKKAQIGLLLKRLEAKNVLPLLMDLVKETLDKDETDDLSIRLKRQSQKINSQLKIAIRSFLPEQSNGLQIAKASFNYYTINKKPIDFEKKIEDLKKNLNVKDLEKLNVYFDKKEKKQKNYLGKKIFSLFETDIQKALSKNQPLYLGDAPMIDSAYVSLRQIFKKIKSEQKKQFSELMQNKCSYDELKNSNLYLLNDIGLEQFNTYREKTKELEELATKLSNQNLLENAKERLRSQKEKIAKERGNIMKDRFQTWKSFANFYRTVSQKHGKILAQLKGIEKEQAESQLLKYWALICEKENQHQLWLIPREKAWECKRWLETVNDTSIDNENSIKLYWFESLTYRSLQKLCFGFLENGNNEFNQNIKDLLPKDRIGNTINGEFAFEGDEERKIEFYKTVLNSKYAKQVLNIPFKQVEEEIISQSFENLSDFQIALEKICYRRFAIYSNYIISFDAQIFDITSLDLKNNEKNNLNTHTHIWRDFWKDENEKNNFDIRLNPEITISYRTPKQSRIEKYGEKTKEYDPNKNNRYLHPQFTLITTISERSNSQTKTLSFIEDEDFKKSINEFNKKLKKDNIKFAFGIDNGEVELSTLGVYLPTFEKETHEEKIYELKQIKKYGFEVLTITDLKYKETDYNGNVRKIIQNPSYFLKKENYIRTFSKSEQEYEEMFAKLFKKEHVLSLDLTTAKMICGHIVTNGDVPALFNLWLKHAQRNVFEMNDHTVKETAKTIRLRNNEELTDNEKEKFAEFISDGKKFAKLTKEGKKSRYLKWIFEDRKENSFTEDENKKFNDCQKKKGKYNSHIIFASRFEGDELKSVTPIFDCRHVFKKRKEFETIRPIKEIENEISRFNTNRTSHNISNEELDLKITDAKKALVANAIGVIDFLYKQYKQRFNDEGLIIKEGFDTQKVEEDIEKFSGNIYRILERKLYQKFQNYGLVPPIKNLMAVRNEGIKDKNAILRLGNIAFIDPSGTSQECPVCKEKSKEKHTNNFICECGFNSTNIMHSNDGIAGFNIAKRGFENFINEK

SEQ ID NO: 57 - protein, 2502 aa, Bacteroidetes bacterium
METYKVTKTIRFKLEAQNVPEIQKDIEGLQSEFNLANFVSDLKNYLDQVRNYLFSEGKEHVFVNNKITIKREWLQNHAKQEWVDFLEKNKRNNSLNNHTRRIQMSIGDFTGLASKIEGTFDEINSICKGLADAAGAQANKRTKRERTGLLLKRLQARKALPSLFSLIENSADKNETGNLSLQLKNKSILIEQQLAAGVQTFLPAQSGGLPVAKASFNYYTINKKPVDFGNEKSELESRLKISIDTIFKLTRENFSKKIEEAITADIQKELNNGKTLLLGDVPMLGIENYVSLRQILKNIKSNQKKAFSDLMQSGKNYNELKATNLYLLNTIEQRQFDNYKVKTNELEKLAVKINQATNDNQKKELISNKQRVAKQRGIIMRDNFATWKSFSNFYRTISQEHGKILALLKGIEKERTESQLLKYWALILENNGQHKLILIPREKAASCKQWIASLNPSGDKLTKLFWFESLTYRSLQKLCFGFTENGNNKFNKNIQNLLPKDNSRKIINGEFAFQGDEQKKIKFYQSVLESKYAQSVLNIPIQQVQADIINQSFASLDDFQIALEKICYRLFAVVEANIEAELLKNDKAQIFNITSSDLRKEAKDKIKSHTQIWKAFWTSENKQNNFETRLNPEITITYRQPKQSKIDKYGERSQKNNRYLHAQYTLITTISEHSNSPTKILSFMSDDEFKSSVDTFNKKFKKDEIKFAFGIDNGEVELSTLGVYFPAFDKTTYKEKVAELEKVNDYGFEVLTIRNLNYKETDYNGKERKIIQNPSYFLKKENYLRTFNKSETAYQKMFTEQFEKKKLLTLDLTTAKVICGHIVTNGDVPALFNLWLKHAQRNIFEMNDHIQKETAKKIVLKNQLDTDNEKLKFAEYISKEKEFGKLNDDEKMKYTKWIFEDRDQNNFTEVENKKFKRCQKIYGNYSTKAKAPVLFASCFIDEELQSVTDIFDVRHIFKKREDFYALKTEEEIKQLIDSYNTNRASHDISNEELDLKILNTKKALVANAVGVIDFLYKHYERRLGGEGLIIKEGFGTGKVEDGIEKFSGNIYRILERKLYQKFQNYGLVPPIKSLMAVRANGIENNKNAILQLGNVGFIDPAGTSQECPVCIEGRLEHTTTCPNKCGFNSERIMHSNDGIASFNIAKRGFNNFVKSKTDKQBACASMSDTKYQITKTVRFKLEPYVVTDESQTEEEKELVLQKETARIKEEMLQIRTNSSNKNVSLEDVLNSKNDIDYNELNTLRTDLINIISQVKYLIYKTDTNGNIIYTDKGPLWSDLEIKFSFLRDYIKSEFYNFKNNKYPDTIKDKPPKKYKLYCVDIQFFRDAISGEQGLFERLNEIEKKIEDFTERELHNKSRFADIALVLGDLTKRTNLEFLKAMVNALVVPNNDEKERDLQKNKLFYAIQDLESLVNRQLAYYTPFKSSMGLQTHGGSFNYYTINKDEKELQEEEKNLTNQFNRIIGSAQEIANTKEVEKKLNIELKEVQARLKECGVDAKEEKCQLKDREIQIKNELSDKKNEKILISQIRKFNLTFDVLVSLYVEKRRKKNDDDARIKIIREQVMSEFHLTNKDLEKTVELNIEEMYKFIKLWKGNEKTKYTTNLKIYDDNQSAQDFVNNCKLFSFNDDYDKGGNLCKTDDLFNSLKALECELKTYSDELGEKYNLKAKIEESKESSFDNEEQQLCDAIKILKEKIKKLKKEIGDIFFYKIGLQNYTDFCNSFKYLAVKFGQMKARRAGIEKDKVEAKLLHYWCVIMEHDDKNSKGETITNKYLYLIPKDNVKNAYNDVKSKANSGNQTGNCNLYYFESLTLRALRKLCFKEKNNTFRKELPNWFPKCEQRARKKGETKETPTSEKDRIFYFKTALTSLNNSGVLDIDNNSNILTMPFFKFKTLDNFETELNRCCYKRIAYVNDNYGDELMSKFNAIRFKITSCDIDNSKERCFTTEIWNQFWNDTLNKDKQYPIRLNPEVKIFWRTAKPSRIEKYTNNLNRNQNFKNRYKKDQFTVAFTVTENALTPKPDYGFIVDEKKPILRGFNKQCDLQTNIDNFNVQLNKNHSVHFSIGIDTGTNGLAYATVINVNNQPELFKVLRIKNNKGVESKDDQHNVRTKQYFYVDELNLKYFTNEEMYNRVFDDGKFYETLQKFDNGKVKTEFEKDFQIGKQIRWVSENPSYFLNESLYNMSFNDGRFIETKVEVFEELEVASLDLTTAKVINGDILLDADFNTYQKLKILNAKRWISREARVSTSLSLVKRNNEICMITTNYPNNGKTIYYQDAIHESNEDFSNVFNQLEKHKVDMSIDLVKIEDNINNYRKAIVANMVGVLTEIYSRMQKKYGNRTLGFIAFEGFDAKTIQSHLDKFDGEITVPLRVALMKKLQLKTNENKKKNTIWFENLVPPYAEVNKFSDEMKYVIKDTEDKDDMEKGEVKQFGVIKFVSKANTSECCPICGKKSNTKHTDYFECCEITLRDWASTPNMSDDDKKLFASIDCNDKVAAYNIAKRAIW

SEQ ID NO: 58 - protein, 1171 aa, unknown
  Metagenome-derived sequence
METYKITKTIRFKLEAKDENIPEIQKDIAGLDNNFDLANFLTGLNHYINDIDKYLFEKKKNGNSVINGKITIKPDFLKNYAKQEWVNFQEKNKLTQNATQNSRPRKERNSINEFTGLDEKIKQTFKEVADIYETLANDASAGLNERAKREHTGLLLKRLQAKNTLPYLISLAENSNNKNETDDLSIQLKNQSSKLEQQLAAGIREFLPAQSSGLPVAKASFNYYTINKAPIDFIKRIEELKKNLKVDDLQKLNSFFDKKSKKNKLYFHDNLFKLIQTDVQEQLKNNKILLLGDTSMLDIENYISLRQVLKNIKSTQKKKFSEWMQTDKNYDDLKKTELYLFKNISLDQFIDYREKTKELEELAVKINQAANGEERKSLISKKEAVAKIRGNIMKDKFEAWKSFANFYRSIAQKHGRILAQLKGIEKEQTESQLLKYWALVLESNNQHKLVLIPRENSGECKKWLEENDNRSSPGSRHIFWFESFTYRSLQKLCFGNLESGTNTFNKTIQNLLLKYSKGKPINGEFAFEGDEQKKIKFYKDVLQNQTTLNLPQEKVQMEIINKNFASLGDFQIALEKICYRRFIVLNSDAEKILLNKFYAQIFDIISLDLKNLEIINNKQEKYLHNDKRHTQIWKEFWTSKNEENSFDIRLNPEIIITYRQPKQSRIDKYGQNSKLSNRYLHPQFTLITTISEHSNSPTRILSFVTDEEFKNSVDEFNKKLKKDNIKFAFGIDNGEKELSTLVVYLPEFSKRTPEEKIAELKQIEKYGFEVLTINDLNYKESDYNGKERKIIQNPSYFLKKENYMRTFDKSEREYDEMFEKLFKKKRTLTLNLTTAKVICGHIVTNGDVPALFNLWLKHAQRNIFEMNDHIKDETAKRIILKNKLDTNKEKLKFAEYISHKEKFDEFSEVEQEKYVHWIFEDREKLDFTTKENSKFNDCTKRKGDYRTDILFASCFIGDELRSVTDIFDCRHIFKKHDEFYSIKSEKEIAAEIESFNTNRTSHDISNEELDLKIVDAKKALVANAVGVIDFLYKKYKERFNGEGLIVKEGFGTREVEQGIEKFSGNIYRILERKLYQKFQNYGLVPPIKSLMAIRSEGLKGNKKAILQLGNVCFIAPDGTSQNCPICETKMNNNHADEIVCKVCGFESKNIMHSNDEIAGFNIAKRGFENFN

SEQ ID NO: 59 - protein, 1194 aa, unknown
  Metagenome-derived sequence
MESYKITKAIRFKLEADEKAIPAVMRDISALRKTGDGADIKAFAEELYELLGYIHDYLYDEKNDDDYIFKRGLTVKNTWLRDNAKDETSGQTLKRGLTIGDIKGKDSRGSDLQENIEKIFDEVVDIHERLESAINSPLQSLPRRASIGLLLKGLARKRALPYLISFLEGSDDKDEKSSVSLIAKKRAKIVTDGLERCIRHYLPAQSHGLPVAKASFNYYTVNKKEIDYKGTIEKLKKDLKVGSLKEDLNRIFDNLKASISKEVKTELLNDISSRLSNGSELFLGYAPAAGIENGNYLRQILKNIKSEQKAAFNEFMTQNPSIGAIKDKKLYLFSDISEGEFNAYKKLTAGIGDAAAKINQARNDGDKQRLRSELNKRKKERGELINAANRRNGNENNFKTYKAFAEVYRKIAQRHGKILAQLKGIERERIEYDMLKYWAVIIELGGRHKLVLIPEKRAEECKKWLETSDESNRKNGSVCWFESFTLRSLKKLCFGNLDSGSNLFNSTIRPLLPKDRRGEAMNGDFAFAKSAAERMPEASEQDILKEAESEKIKFYKNVLKGQKALNNLPEEEIQTEIVKKDFNSLEAFQIALEKICYRVFYSLSANAEQELKDKHGAQIFEITSLDLKNPENVKDKQEKYAHADKRHTRIWKDFWTAGNEKGRFDTRLNPEITITYREPKQSRVDKYGKGSANYDAGKKNRYLHPQFTLTATVSEHSNSPAKTLSFMTDKEFKESVDDFNKKFKKDDIKFALGIDNGETELSTLGVYLPAFGKGAATEEKIAELKQIEKHGFKVLTVKDLNYKETDRNGKERKIVQNPSYFLSKENYTRTFKKSAEEYEKMLAGVFEEKRILTLDLTTAKVICGHIVTNGDVPALYGLWLKHAQRTVFEMNDHGKAKTAKDIKIKPKLDTDKEKLKFAEHISKIKEFRGLTAEEKAKYVKWIFEDRKPGDFTDKEAETFSDCLKKKGDYRSGIVFASCYVGEELKSVTEILNCRHIFKKREEFYSIDSEEEITAKLEGYNTDRTSHNISNEELDLKITDAKRALVANAVGVVDFLYKYYKQNSGGEGLVVKEAFDAKKVEEDIEKFSGNIYRILERKLYQKFQNYGLVPPIKSLLAVRGEKEELRLGNVSFVKEEGTSQRCPVCGAKSDEKHTDRLKCQKCGFDSYGIMHRNDGIAGFNIAKRGFENFMKEERK

SEQ ID NO: 60 - protein, 1187 aa, unknown
  Metagenome-derived sequence
MEKYKITKTIRFRLDADNTAISAIVKDTEALEARGQGFKIKKFVNALGRFLSGDGVQKYLYDMSNEENCVFKRNLVIKNTWLKNNAKQEIAGMDLKRGLIIKDIKGLQDKIEEIYDKLWEIYEILYESAYLPLQDLARREGIGLLLKKLSVKNALPFIISFVEESNDKNEADDLSLRLKKQGKEILTQLEIGINEYLPAQSSGLPVAKASFNYYTINKTPVDFGEKIQELEKRLSVDIKKEISSFTGGIKTAIKNKIAGKKILLGDTPMFESENSVSLRQILKNIKSEQKAQFNKFMTTQNNPQLEEMKTMGWYLFGDITEGEFNDYKEQTKEIERVGAKINQCGNIKEKKELRSQLQKLKKKRGELISEAHKKGGNDKNFKTYKEFAKFYRKIAQRHGKILAQIKGIEKEKIDSAMLNYWAAVIELSGRHKLVLIPKKDENAKKCIEWLEDESKHKNGSCKIFWFESFTFRSLQKLCFGNLDSGTNTFNQKIQNLLPCDERGNLMNGEFAFKGDEQEKIKFYKKVLQSQKDINLPQKEVVDNVVGRKFETMDEFKIALEEICYIRRERLSANAESELKSKFNAQIFDITSLDLRNPVNCAGKPEVYHHNDKRHTEIWKEFWSLDNERRNFNIRLNPEITITYRKPKESRILKYGKGTEKYNADMKNRYLYPQYTLLTTISEHCNTPTKILSFMTDNEYEESIKAFNSKLKKEDIKFAFGIDSGETELSTLGVYLPEFSAESTELKDIEKYGFNVLTIKDLNYTETDYNGSDKKIVKNPSYFVDKSLYMRTFKKTEQEYEKMFAEQFEAKKRLSLDLSAAKVICGHIVTNGGVSEHFGLWLKHAQRTIFWMNDHTEKKTAKNIKLKDSSELTYDEREKFAEHISSDEKFKKLDVEEKKRYVRWIFEDRETLNFTEAENKKFGGYQKKKGDYRLGILFASCFIGKELESVTQILDCRHIFKKREEFYSLKSKEDIEAEIKRYNTDYTNHNISTEQLDLKFVNVKNALVANAVGVIDLLYKQYKERLGGEGLIAKEGFDTKKVEEDMEKFSGNIYRILERKLYQKFQNYGLVPPIKNLMAVRADKVEISEAEKSKIRENCKISKIDPENEIIKRNKTLILRLGSIAFVNDADTSQECPACGTKSKEKHVDNFICGCGFNSTGIIHSNDGVAGFNIAKRGFVNLMEHELR

SEQ ID NO: 61 - protein, 1190 aa, unknown
  Metagenome-derived sequence
MESYKTTKAVRFRLEADDAAAPLVAGEVAALTAVGQGFKIRRFINRLGEFLGEGVQEYLYDAEGKVKDNLAVKNTWLKSNAKREIAGMIAGMKLRRGLAVKDIKGLRESIEKVFNDVWDTYEKLFSSVDLPLHDLAKRAAIGLLLKRLQVKSALPYLISFVEDSSDKNETGDLSLRLKRQAKDILEQLEAGVYEYLPPQSGGLEVARASFNFYTINKKPVDFGKETEKLNNSLIVSAEEKVHRGINVSKEVKSAIVNDILDRSSGKKILLGDAPEHDGEGCVSLRQILKNIKSEQKAAFNEFMTQNPQFEALKGKGWYLFSDITENEFDDYRKQTKEIERVATQKNQCERGDKKKLLQSDLQKLKKQRGALINAANKKGGNENNFKTYKAFADFYRKIAMDHGKILARLKGIERERVESATLKYWAVVAEVNNRHKLVLIPRENAGACRVWLDGGGHRNGAFKIFWFESFTFRSLRKLCFGFVENETKSNTFYDEWKKELTDYRNVSSEIDLNVTPGDRKGYTEEELRQNEQRKIKFYKAVLGSGCAKRSLNIPTEQVRKEIVNREFKNLDEFQIALEKICYLRFATLSANAEAELKKYNAQIFDITSLDLKNPESAAGKAEKYEHSDKRHTKIWKEFWTAENENAGFEIRLNPEIKILYRRPKQSRVNKYGEGTERYNPNRKNRYLRPQYTLVTTISEHSNSPAKEVSFVSEKEYTDLIDEFNGRFKKEDIKFAFGIDNGETELSTLGVYLPAFKKDTKEERLAELSNVEKYGFDVLAIGDLNYKENDCNGKERKIVQNPSYFLNKDLYMRTFNKTEAEYGEMFARQFEEKRLLTLDLTTAKVVCGRIVTNGDVPALLNLWLKHAQRNIFEMNDHIKDKTGKKILLKDKLDTDNEKRKFAGYISHKDEFDKLSGEEKARYVQWIFEDRDSLNFTKGEENKFERCQEKKGDYRSGVLFAASYTGVDLQSVTDIFDCRHVFKRRGEFYSIKPEREIKQEIDSFNTNRTSHAISNEELDLRIVHVKSALAANAVGVIDFLYRQYRERFGGEGLIVKEGFDTKKVEEDMEKFSGNIYRILERRLYRKFQNYGLVPPIKNLMAVRAEGMRADEKNSKPDLGAIVRLGNIGFVNETYTSQECPVCGGNLNHEKVCPKNCGFNDKRFMHSNDGIAGFNIAKRGFENFLNEKHGGAQ

SEQ ID NO: 62 - protein, 1067 aa, Omnitrophica WOR_2 bacterium
MKNGINLFKTKTTKTKGVDMEKYQITKTIRFKLLPDNAHEIVEKVKSLKTSNVDELMDEVKNVHLKGLELLFALKKYFYFDGNQCKSFKSTLEIKARWLRLYTPDQYYLKKSSKNSYQLKSLSYFKDVFNDWLFNWEESVSELAIIYEKYKICQHQRDSRADIALLIKKLSMKEYFPFISDLIDCVNDKNSNKTFLMKLSEELSVLLEKCNSRALPYQSNGIVVGKASLNYYTVSKSEKMLQNEYEDVCQSLDKNYDITEMKVILYKEKLDNLNFKDVTIANAYNLLKENKALQKRLFSEYVSQGKVLSLIKTELPLFSNINDNDFEKYKEWSNEIKKLADKKNTFCKKTQQDKIKDIQNKISELKKKRGALFQYKFTSFQKHCDNYKKVAVQYGKLKARKKAIEKDEIEANLLRYWSVILEQEDKHSLVLIPKNNAKDAKQYIETINTKGGKYIIHHLDSLTLRALNKLCFNAVDIEKGQMVRENTFYQGIKEEFERNKINCDNQGVLKIQGLYSFKTEGGQINEKEAVEFFKEVLKSNYAREVLNLPYDLESNIFQKEYTNLDQFRQDLEKCCYALHSKIGKDDLDEFTRRFEAQVFDITSIDLKSKKEKTKTTGEMKKHTQLWLEFWKGAIEQNFATRVNPELSIFWRAPKSSREKKYGKGSDLYDPNKNNRYLYEQYTLALTITENAGSHFKDIAFKDTSKIKEAIKEFNMSLSQSKYCFGIDRGNAELVSLCLIKNEKDFPFEKFPVYRLRDLTYQGDFKDKHDQMRYGVAIKNISYFIDQEDLFEKNNLSAIDMTTAKLIKNKIVLNGDVLTYLKLKEETAKHKLTQFFQGSSINKNSRVYFDEDENVFKITTNRNHNPEEIIYFYRGEYGAIKNKNDLEDILNEYLCKMETGESEIVLLNRVNHLRDAISANIVGILSYLIDLFPETIVALENLAKGTIDRHVSQSYENITRRFEWALYRKLLNKQLAPPELKENILLREGDDKIDQFGIIHFVEEKNTSKDCPNCRKTTQQTNDNKFKEKKFVCKSCGFDTSKDRKGMDSLNSPDTVAAYNVARKKFES

SEQ ID NO: 63 - protein, 1214 aa, Bacteroidetes bacterium
VGDNKKPTNYQYTRGVRFKAEPVDNTKLLFEKEETKNVNLTALEEDLSKFHKDLTDLLYNKEKKIKNKSDKKFKTTITINKLWLKCWHKDIFYGQIKKNSNKKGKYNLKDLNSLPFKEKLEQWDKACKEIKKFSSAPQDSQYRRSDFAEWIKLLLNNWKYFNDFLRELHAKSPEDDKKITQLKEDSDKIHKNLKISEKSYLSFQSSGVEIAKASLNYYTVNKKPKEYDKELKEAEKDLKEDSFSSIVEEKYRYQLKSKSAIFTFKSKQEKEWIERYCKEEFNKNLKENDIGLSLDKTYSMMKAFKAEQKSIFYELASRVPLKANDNLRNKSSTSLFTRFQEKVSHTNSDKKEDYINNNKKHFLFNYKFLCESFSSIDKLSESFSLFKDIKGNKKFHYEEFVKLCKKIKNPKNKKEGSSNTKKLAEKRGKYLKKTQAYFKEYTDFCDDYEKIAQKRGKLIAQIKGIEKEKRESSEINYWALIYTKSGKRQLWLIPKKPSQTDKSEQNNSSDTNLQSAKKCIDKKPQASAEANSYLSSFESLTMRALHKLCFAEQSSFVKEMPDELKKQQKEVKTFRTQGDKEKLKQKEKKEINFLKDLLKDNYTKSKLKLNNFNLTKVHKAENKQDFELALEKDCYYEKKVSFNDKEKEEFIKKFHVSTFKISSYDLQGRNKNTHQSPESENRIHTDWWNEFWKKIKNNQEESIVKEFKIGAIRLNPEIKIRHRKVDKNLEAYFYKRKFPKEFKHRNLQEQFTAHFTLSLNAGKKYEDLAFSKPEEILEKIENFNQRLNKSRNFETAWKYGIDRGNIELATLCLSRFNREDFYEVKGIKILKPTFTKTEKDTPCYSLKNYDLKETYQTKTQGEKTRFAVQNVSYFLEEKYLNDTNFKPENLTCLDLTTAKVIKGKIITNGDIMTYLKLKKAVAKRSLFELYTKREINDFSKLQWIDYEHGDKNRKMSDGVLNIKTKDGEKTIYWYCRKYENILINSNKNIKYSKKSILCSLSSYLGNLKESNNQHTPSILKINHLRDALTANMVGVICFLQKKYPGFIILEDLNRGIIDRHFFQHNENISRRLENALYNKFQTLGLVPPHVKDIIQLRENNRKKANKEKEKIEEQIGAIVFVSEENTSKTCPYCEEISKKQNKELKNDLKFRQHRFICDSCGFDTYYFYENPVKEPTPEIDETKKKKEFEIVRDIDDPDKVASFNVAKKSMKESS

SEQ ID NO: 64 - protein, 1033 aa, unknown
  Metagenome-derived sequence
MENSNLYQVVKTIRFKLEPVGKMDTPKFGDKNAESKANLTPFIELVKKTMTNVKALVFSKQDGEDGEKWRKILEVNYRFLRSYLKNSFYENRGDSQEKSKKHKISDLEYLQKALENLFAEFDEILDGLEDFEKRNTKNQYEKQRHAQAGLLLNRLCKRSNFGFLKAFVGALAQTNKPFFDDKTDKLKKQIDKFETELEKQKEFFLPYQSNGVLFAGGSFNRYAINKTPKMLDKELREEQTNLKKSLCEHKIKIDTLNTLGLKNDCPCTSLDNSYTFIKDYKAKQKSKFIELVQKGEFDEAKKVNLFECSETDFETFKTRTKQIQNEKDKDERTKLKQKRGEFFKSQKRGKFFKSQTQNYENLCDLYKKIAQKRGQIVAKICAIKKEKEMCEQVKYWCVALEKGGEFYLYMFLRDENDNIKNAYDFVSKLQTQKSGETKLHYFDSLTLKAVRKLCFKETDGSFKKALKNVKFPECEQNLDEKVKISFYQNVLKNAKTLNLSKFENLQSVTEGKFESLSEFEVALNMVCYTKTVCVSESVEKELKKFKPLVFHITSQDLAAKREKKAHTQIWHEFWRESNEKSKFPLRLNPELKVMWREARPSRVEKYAEQSDKFDPNKKNRYLHPQFTLALNFTQNAHNEAINLAFKDVQNKGEAVKKFNENFKSSEYAFGIDVGTKDLALLCLIDKNKKPVNFDVYEICNENEICNEKLGFEKFGFYKDGTRRDEPYKLIKNPSYFLNESLYKKTFNATKEEFERSFSELFKRKSVCALDLTTAKVICGKIILNGDFSTHLNLKILNAKRKISAKLKKDPTLKIEYDNDDNILFGSNVIFYYNNKYEIVRPYDEIKNEIFEFHEKQRLDDARLEDNINKTRANLVANMVGVISFLHKEFSGFVVLENLKQSEIEGNHRLKFEGDITRPLELALYRKFQSKCLTPPISELIKLREGEKNENVESDLILQFGIIKFVDKDKTSRLCPACGKDAYENNNSKYKTDKKDGVFECAGCGFNNKNNAGDFAALDTNDKIATFNIAKRGL

SEQ ID NO: 65 - protein, 1114 aa, unknown
  Metagenome-derived sequence
MEKFKITRTIRFKANPISINKLQDQTKSLSENSEADIVGIINNANQIINDLEGLIFTNEEKNNLRKDVTIHFRWIRQYVKNDWYAWKEKQTNNSKQAEKGKSKSAEKDQLKSPLAQLALLRDKFPDAHKTSKTIQSSSPNSNKESSEKKLPLGDVPFLKEEFTFFCNYWREIAEKLNEAYSREEHNRMRRADIAKHLNELSKRQILPFLSDFLANGNDKKNDEKIKNLIVKVIEFKKDLEIAKNAYLSAQSSGIMLARASFNYYTLNKKPKDFDSEERRIIENMNAKYYQPGNIPQIIKDLKIDGSLSIEKLYEELKSYKAEQKAKFQEAISQGLKFEELQAKFPLFETTQEIFNDYVSKTNLITQKATQKNNTPKGSMEFKRLQDEINKLKRERGKMLQQGKFRNFKALNEEFKRVAVKKGKLKAQLKGIEKERIDSQRLQYWALIGQEENKYKLILIPKENVSKAYTEIVNQRWIDDRVSMYLYYFESFTFRALRKLCFGVNGNTFMPEIKNELPKYNQQDFGEHIFKTEDGKGDEKALVEFYQQVLKTDFVLKNLALPHQQMEEVTTTTFKDLNSFKIALEKICYNKKMVASPRVLRNLELSYGAEIFELSSQDLLKEHSTNLKNHTKIWNLFWSKENEEKNFDTRLNPEIGIFWREPKASRIEKYGEGTAHYDPQKKNRYLHPQFTIAFSINENALSNDLNYAFEGFEKQKEAMMEFNQKINKEFKDGMEQKKLGAFGVDTGEAELATIGLTDNGKPFPVKVLKVKSDKLNYSKQGYFKDGAMREKPYKAIDNLSYYLKKDLYDKTFRDDHFEQTFREIFEEIETETIDLTSSKLICEHIVVNGDLHTRSKLNILNAKRQIRQALITNPNLEIKFEDNKILISETDEERKKINPWKAVYHTNEELEQIKYFEAVKEEIEQYLKKVQDDSAEVLQNINRFREVAAGNMTGVIFHLYNKYPILIAIENLAQGTIEKHRLRYEGVMDRPLERALYRKFQSIGLTPPVSDLIAIRDNLTQKKKDKMSQLGVLQFVDEQNTSKTCPHCEKNAYEGERKNLYLEEKKKGIFSCGHCGYQNINNPMGLSLHSNDAVAAFNIAKRGIKNLKKGNTHLP

SEQ ID NO: 66 - protein, 1064 aa, mithella sp. SCADC
MEKYKITKTIRFKLLPDKIQDISRQVAVLQNSTNAEKKNNLLRLVQRGQELPKLLNEYIRYSDNHKLKSNVTVHFRWLRLFTKDLFYNWKKDNTEKKIKISDVVYLSHVFEAFLKEWESTIERVNADCNKPEESKTRDAEIALSIRKLGIKHQLPFIKGFVDNSNDKNSEDTKSKLTALLSEFEAVLKICEQNYLPSQSSGIAIAKASFNYYTINKKQKDFEAEIVALKKQLHARYGNKKYDQLLRELNLIPLKELPLKELPLIEFYSEIKKRKSTKKSEFLEAVSNGLVFDDLKSKFPLFQTESNKYDEYLKLSNKITQKSTAKSLLSKDSPEAQKLQTEITKLKKNRGEYFKKAFGKYVQLCELYKEIAGKRGKLKGQIKGIENERIDSQRLQYWALVLEDNLKHSLILIPKEKTNELYRKVWGAKDDGASSSSSSTLYYFESMTYRALRKLCFGINGNTFLPEIQKELPQYNQKEFGEFCFHKSNDDKEIDEPKLISFYQSVLKTDFVKNTLALPQSVFNEVAIQSFETRQDFQIALEKCCYAKKQIISESLKKEILENYNTQIFKITSLDLQRSEQKNLKGHTRIWNRFWTKQNEEINYNLRLNPEIAIVWRKAKKTRIEKYGERSVLYEPEKRNRYLHEQYTLCTTVTDNALNNEITFAFEDTKKKGTEIVKYNEKINQTLKKEFNKNQLWFYGIDAGEIELATLALMNKDKEPQLFTVYELKKLDFFKHGYIYNKERELVIREKPYKAIQNLSYFLNEELYEKTFRDGKFNETYNELFKEKHVSAIDLTTAKVINGKIILNGDMITFLNLRILHAQRKIYEELIENPHAELKEKDYKLYFEIEGKDKDIYISRLDFEYIKPYQEISNYLFAYFASQQINEAREEEQINQTKRALAGNMIGVIYYLYQKYRGIISIEDLKQTKVESDRNKFEGNIERPLEWALYRKFQQEGYVPPISELIKLRELEKFPLKDVKQPKYENIQQFGIIKFVSPEETSTTCPKCLRRFKDYDKNKQEGFCKCQCGFDTRNDLKGFEGLNDPDKVAAFNIAKRGFEDLQKYK

SEQ ID NO: 67 - protein, 1084 aa, Smithella sp.
MEKYKITKTIRFKLLPDKIQDISRQVAVLQNSTNAEKKNNLLRLIQRGQELPKLLNEYIRYSDNHKLKSNVTVHFRWLRLFTKDLFYNWKKDNTEKKIKISDVDYLSRVFEDFFNEWETVIERINTDCNRPEESKTRDAEIAFSIKKIATKQMFPFIKSFVYNSNYKNSEETKSKLTALLNEFETVLKICEQNYLPSQSAGIVIAKASFNYYTINKKQKDYKGYTDDIEKIEKGMNSKFHYERKYDQLLEELNLIALKELPLIEFYSKIKSYKSTRKIEFSEAVSKGLAFADLKSKFPLFQTESNKYAEFLELTGRITQISTAKSLLSKDNPEAQKLRDEIKKLRINRGEYFKNNFHKYISLCNLYKKIADKKGRLKGQVKGIENERIDSQRIQHWALVLEDNLKHSLILIPKEKVTEVYRKVRASKADSTSSSSSLYYFESMTYRALHKLCFGVNGNTFLPEIQKELPEYNPNKQSDFGEFCFHKSNTDKEIDEPKLISFYQSVLKTNYVKDNLNLPQSVFDEATVQTFETRQDFQIALEKCCYAKKTIISETLKKEILEDNNVQIFQITSLDLQRSEQKNLKAHTKIWNRFWTKQNETANYDLRLNPETAIVWRKPKKTRIDKYGAGTSLYDPKKRNRYLHEQYTLCTTVTDNALNNEITFAFEDTKKKGTEIVKYNEKINQTLKKEFNKNQLWFYGIDAGEIELATLALMNKDKEPQLFTVYELKKSDFFKHGYIYNKERELVIREKPYKAIQNLSYFLNEELYEKTFRDGKFQETFNELFKEKHVSAIDLTTAKVINGKIILNGDMITFLNLRILHAKRKIYEELIINPQAELKENEKEYYLYFDKEGTEKVEKIYRSRLDFEHIKPYQEIRNDLNAYFKNVQKNEAKVEDQINQTRRALVGNMIGVIYYLYQKYRGIISIEDLKQTKVESDRNKFEGNIERPLEWALYRKFQQEGYVPPISELIKLRELEKFPLKDVKQPKYENIQQFGIIKFVSPEETSTTCPSCEKKAYELQKEKKGEEKPAENKRYEADKKAGVFCCPKCGFHNRTNPMGYESLDSNDKVAAFNIAKRGFEQNFRQ

1. A complex comprising a CasΩ nuclease and at least one preselected guide RNA designed for binding to at least one target RNA.

2. The complex according to claim 1, further bound to a target RNA molecule having a sequence that is at least 90% complementary to said guide RNA.

3. The complex according to claim 1, wherein said guide RNA comprises a sequence selected to be specific for a bacterium, a sequence selected to be specific for a virus, a sequence selected to be specific for a fungus, a sequence selected to be specific for a protozoan, a sequence selected to be specific for a genetic disorder, and a sequence selected to be specific for a proliferative disorder.

4. The complex according to claim 1, wherein said nuclease comprises a nuclear localization signal.

5. A method for cleaving a nucleic acid molecule selected from dsDNA, ssDNA, and RNA, comprising the steps of a) providing at least one CasΩ nuclease enzyme, b) providing at least one preselected guide RNA, c) forming a complex between the least one CasΩ nuclease enzyme and the at least one preselected guide RNA, d) binding of the complex of c) to a target RNA based on the at least one preselected guide RNA, and e) cleaving said nucleic acid molecule selected from dsDNA, ssDNA, and RNA by the at least one CasΩ nuclease enzyme.

6. A method for detecting at least one target RNA in a cell, tissue, cellular nucleus, and/or sample, said method comprising:
a) providing at least one ssDNA, dsDNA or RNA reporter nucleic acid in said cell, tissue, cellular nucleus, and/or sample,
b) contacting said cell, tissue, cellular nucleus, and/or sample with at least one complex between at least one CasΩ nuclease enzyme and at least one preselected guide RNA, wherein said at least one preselected guide RNA comprises a sequence that is at least 90% complementary to the target RNA, and
c) detecting a cleaving, cutting and/or nicking of said at least one ssDNA, dsDNA or RNA reporter nucleic acid, wherein detecting said cleaving the at least one reporter nucleic acid detects said at least one target RNA in said cell, tissue, cellular nucleus and/or sample.

7. The method according to claim 6, wherein detecting said cleaving, cutting and/or nicking of the at least one reporter nucleic acid comprises detecting a change in the signal of a suitable label and/or detecting the said cleaved at least one reporter nucleic acid fragment itself.

8. The method according to claim 6, wherein the at least one target RNA is a mutated target RNA comprising at least one mutation compared to a control target RNA.

9. A method for modulating expression of at least one target RNA in a cell, tissue, cellular nucleus, and/or sample, wherein said at least one target RNA is selected from an mRNA, non-coding RNA and a viral RNA molecule, said method comprising:
a) contacting said cell, tissue, cellular nucleus, and/or sample with at least one complex between at least one CasΩ nuclease enzyme and at least one preselected guide RNA, wherein said at least one preselected guide RNA comprises a sequence that is at least 90% complementary to the at least one target RNA, and
c) binding the complex of b) to the at least one target RNA and thereby altering the stability, processing, or translation of the at least one target RNA,
whereby the binding in c) modulates the expression of at least one target RNA in the cell, tissue, cellular nucleus, and/or sample.

10. A method for editing the sequence of at least one target RNA in a cell, tissue, cellular nucleus, and/or sample, wherein said at least one target RNA is selected from an mRNA, non-coding RNA and a viral RNA molecule, said method comprising:
a) contacting said cell, tissue, cellular nucleus, and/or sample with at least one complex between at least one modified and catalytically inactive CasΩ nuclease enzyme complexed with at least one RNA-modifying enzyme and at least one preselected guide RNA, wherein said at least one preselected guide RNA comprises a sequence that is at least 90% complementary to the at least one target RNA, and
c) binding the complex of b) to the at least one target RNA, and editing of the at least one target RNA by said at least one RNA-modifying enzyme.

11. The method according to claim 5, wherein the at least one target RNA comprises a nucleic acid sequence that is specific for a disease state, such as, for example, for cells selected from the group consisting of cells exhibiting a genetic disorder, cells exhibiting a proliferative disorder, such as cancer cells, immune cells that produce autoantibodies, cells infected with bacterial or viral pathogens, bacterial pathogens, protozoan pathogens, cells of microbiota, and contaminating bacteria or archaea.

12. A method for specifically inactivating an undesired cell or virus, comprising contacting said cell or virus with a complex according to claim 1, wherein said guide RNA is specifically selected for said undesired cell or virus to be inactivated.

13. A method for preventing and/or treating a disease comprising administering to a subject in need of such treatment an effective amount of the complex according to claim 3.

14. A method for cleaving a nucleic acid molecule selected from dsDNA, ssDNA, and RNA, for detecting at least one target RNA in a cell, tissue, cellular nucleus, and/or sample, for modulating expression of at least one target RNA in a cell, tissue, cellular nucleus, and/or sample, for editing the sequence of at least one target RNA in a cell, tissue, cellular nucleus, and/or sample, for specifically inactivating an undesired cell or virus, or for decontaminating a preparation from an undesired contaminant, wherein said method comprises the use of a complex of claim 1.

15. The complex according to claim 1, wherein said target RNA is flanked by at least one RNA protospacer-adjacent motif (rPAM).

16. The method according to claim 6, wherein the at least one target RNA comprises a nucleic acid sequence that is specific for a disease state, such as, for example, for cells selected from the group consisting of cells exhibiting a genetic disorder, cells exhibiting a proliferative disorder, such as cancer cells, immune cells that produce autoantibodies, cells infected with bacterial or viral pathogens, bacterial pathogens, protozoan pathogens, cells of microbiota, and contaminating bacteria or archaea.

17. The method according to claim 9, wherein the at least one target RNA comprises a nucleic acid sequence that is specific for a disease state, such as, for example, for cells selected from the group consisting of cells exhibiting a genetic disorder, cells exhibiting a proliferative disorder, such as cancer cells, immune cells that produce autoantibodies, cells infected with bacterial or viral pathogens, bacterial pathogens, protozoan pathogens, cells of microbiota, and contaminating bacteria or archaea.

18. The method according to claim 10, wherein the at least one target RNA comprises a nucleic acid sequence that is specific for a disease state, such as, for example, for cells selected from the group consisting of cells exhibiting a genetic disorder, cells exhibiting a proliferative disorder, such as cancer cells, immune cells that produce autoantibodies, cells infected with bacterial or viral pathogens, bacterial pathogens, protozoan pathogens, cells of microbiota, and contaminating bacteria or archaea.
